(19) United States
(12) Patent Application Publication
(10) Pub. No.: US 2023/0124669 A1
(43) Pub. Date: Apr. 20, 2023

(54) HETERODIMERIC PROTEINS WITH FC MUTATIONS

(71) Applicant: Adagene AG, Basel (CH)

(72) Inventors: Peter Peizhi LUO, Lansdale, PA (US); Fangyong DU, New Haven, CT (US); Guizhong LIU, Suzhou (CN); Zhengxi DAI, Suzhou, Jiangsu (CN); Jianfeng SHI, Suzhou, Jiangsu (CN); Zhixiong LIN, Suzhou, Jiangsu (CN); Yan LI, Suzhou, Jiangsu (CN)

(73) Assignees: Peter Peizhi Luo, Suzhou, Jiangsu (CH); Adagene AG, Basel (CH)

(21) Appl. No.: 17/759,282

(22) PCT Filed: Jan. 22, 2021
(86) PCT No.: PCT/CN2021/073347

§ 371 Date: Jul. 21, 2022

(30) Foreign Application Priority Data
Jan. 23, 2020 (CN) PCT/CN2020/073960

(51) Int. Cl. C07K 16/28; C07K 16/32; A61P 35/00; A61P 11/00

(52) U.S. Cl. CPC C07K 16/2827; C07K 16/2878; C07K 16/2818; C07K 16/2809; C07K 16/32; A61P 35/00; A61P 11/00; C07K 2317/526; C07K 2317/21; C07K 2317/53; C07K 2317/52; C07K 2317/31; C07K 2317/622; C07K 2317/14; C07K 2317/51; C07K 2317/515; C07K 2317/522; C07K 2317/524; C07K 2317/565; C07K 2317/55; C07K 2317/33; A61K 2039/505

(57) ABSTRACT

Provided are heterodimeric proteins comprising polypeptides having CH3 domains with engineered residues that form disulfide bonds and/or salt bridges. Also provided are activatable antibodies targeting CD3 and/or HER2. Compositions, methods of manufacture and methods of treatment using the heterodimeric proteins and the activatable antibodies are further provided.

### CROSS REFERENCE TO RELATED APPLICATIONS

[0001] This application claims the priority benefit of International Application No. PCT/CN2020/073960, filed on Jan. 23, 2020, which is incorporated herein by reference in its entirety.

### FIELD OF THE INVENTION

[0002] The present application relates to heterodimeric proteins (such as bispecific antibodies) and activatable antibodies, methods of preparation, and methods of use thereof.

### REFERENCE TO SEQUENCE LISTING

[0003] The content of the following submission on ASCII text file is incorporated herein by reference in its entirety: a computer readable form (CRF) of the Sequence Listing (file name: 695402001041SEQLIST.txt, date recorded: Jan. 21, 2020, size: 656 KB).

### BACKGROUND OF THE INVENTION

[0004] Multispecific antibodies can simultaneously bind multiple different antigens. This property enables the development of therapeutic strategies that are not possible with conventional monoclonal antibodies. One format of multispecific antibodies are heterodimeric proteins, e.g., antibodies made up of separate chains that bind different antigens. Such heterodimeric, multispecific antibodies can only target multiple antigens correctly when assembled with the right complement of monomer components. Therefore, there exists a need in the art for multispecific antibodies that heterodimerize in a specific and stable manner.

[0005] An activatable antibody exhibits an “activatable” conformation such that an antigen-binding moiety contained therein is less accessible to bind to its target when uncleaved than after cleavage in the presence of one or more specific proteases. Activatable antibodies thus provide antigen-specific binding proteins that are only capable of binding their targets in certain contexts (e.g., in the protease-rich tumor microenvironment). Bispecific T cell engagers are bispecific antibodies (BiTE) that are capable of binding to both T cells and target cells such as tumor cells. Because of their on-target off-tumor effects, BiTE molecules are associated with high cytotoxicity, including toxicity to the central nervous system (CNS) and cytokine storm. There is a need for activatable BiTE molecules with enhanced specificity and reduced side effects.

[0006] All references cited herein, including patent applications, patent publications, non-patent literature, and UniProtKB/Swiss-Prot/GenBank Accession numbers are herein incorporated by reference in their entirety, as if each individual reference were specifically and individually indicated to be incorporated by reference.

### BRIEF SUMMARY OF THE INVENTION

[0007] The present application provides heterodimeric proteins comprising CH3 domains having engineered residues that form disulfide bonds and/or salt bridges. Also provided are activatable antibodies targeting CD3 and/or HER2.

[0008] Accordingly, one aspect of the present application provides a heterodimeric protein comprising a first polypeptide comprising a first immunoglobulin heavy chain constant domain 3 (CH3 domain) and a second polypeptide comprising a second CH3 domain, wherein: i) the first CH3 domain comprises a cysteine (C) residue at position 390 and the second CH3 domain comprises a cysteine residue at position 400, or the first CH3 domain comprises a cysteine residue at position 400 and the second CH3 domain comprises a cysteine residue at position 390; or ii) the first CH3 domain comprises a cysteine residue at position 392 and the second CH3 domain comprises a cysteine residue at position 397, or the first CH3 domain comprises a cysteine residue at position 397 and the second CH3 domain comprises a cysteine residue at position 392; or iii) the first CH3 domain comprises a cysteine residue at position 392 and the second CH3 domain comprises a cysteine residue at position 400, or the first CH3 domain comprises a cysteine residue at position 400 and the second CH3 domain comprises a cysteine residue at position 392; and wherein the amino acid residue numbering is based on EU numbering. In some embodiments, i) the first CH3 domain comprises N390C substitution and the second CH3 domain comprises S400C substitution, or the first CH3 domain comprises S400C substitution and the second CH3 domain comprises N390C substitution; or ii) the first CH3 domain comprises K392C substitution and the second CH3 domain comprises V397C substitution, or the first CH3 domain comprises V397C substitution and the second CH3 domain comprises K392C substitution; or iii) the first CH3 domain comprises K392C substitution and the second CH3 domain comprises S400C substitution, or the first CH3 domain comprises S400C substitution and the second CH3 domain comprises K392C substitution.

[0009] In some embodiments according to any one of the heterodimeric proteins described above, i) the first CH3 domain further comprises a positively charged residue at position 357 and the second CH3 domain further comprises a negatively charged residue at position 351, or the first CH3 domain further comprises a negatively charged residue at position 351 and the second CH3 domain further comprises a positively charged residue at position 357; or ii) the first CH3 domain further comprises a positively charged residue at position 411 and the second CH3 domain further comprises a negatively charged residue at position 370, or the first CH3 domain further comprises a negatively charged residue at position 370 and the second CH3 domain further comprises a positively charged residue at position 411; or iii) the first CH3 domain further comprises a positively charged residue at position 364 and the second CH3 domain further comprises a negatively charged residue at position 370, or the first CH3 domain further comprises a negatively charged residue at position 370 and the second CH3 domain further comprises a positively charged residue at position 364; or a combination of i) and ii), or a combination of i) and iii), and wherein the amino acid residue numbering is based on EU numbering. In some embodiments, the first CH3 domain further comprises a positively charged residue at position 356 and the second CH3 domain further comprises a negatively charged residue at position 439, or first CH3 domain further comprises a negatively charged residue at position 439 and the second CH3 domain further comprises a positively charged residue at position 356; and wherein the amino acid residue numbering is based on EU numbering. In some embodiments, i) the positively charged residue is a lysine (K) residue, and the negatively charged residue is an aspartic acid (D) residue; or ii) the positively charged residue is a lysine (K) residue, and the negatively charged residue is a glutamic acid (E) residue; or iii) the positively charged residue is an arginine (R) residue, and the negatively charged residue is an aspartic acid (D) residue; or iv) the positively charged residue is an arginine (R) residue, and the negatively charged residue is a glutamic acid (E) residue. In some embodiments, i) the first CH3 domain comprises E357K and T411K substitutions and the second CH3 domain comprises L351D and K370D substitutions, or the first CH3 domain comprises L351D and K370D substitutions and the second CH3 domain comprises E357K and T411K substitutions; or ii) the first CH3 domain comprises E357K and S364K substitutions and the second CH3 domain comprises L351D and K370D substitutions, or the first CH3 domain comprises L351D and K370D substitutions and the second CH3 domain comprises E357K and S364K substitutions; or iii) the first CH3 domain comprises D356K, E357K and S364K substitutions and the second CH3 domain comprises L351D, K370D and K439D substitutions, or the first CH3 domain comprises L351D, K370D and K439D substitutions and the second CH3 domain comprises D356K, E357K and S364K substitutions.

[0010] In some embodiments according to any one of the heterodimeric proteins described above, i) the first CH3 domain further comprises K392D and K409D substitutions and the second CH3 domain further comprises D356K, and D399K substitutions, or the first CH3 domain further comprises D356K and D399K substitutions and the second CH3 domain further comprises K392D and K409D substitutions; or ii) the first CH3 domain further comprises L368D and K370S substitutions and the second CH3 domain further comprises E357Q and S364K substitutions, or the first CH3 domain further comprises E357Q and S364K substitutions and the second CH3 domain further comprises L368D and K370S substitutions; or iii) the first CH3 domain further comprises L351K and T366K substitutions and the second CH3 domain further comprises L351D and L368E substitutions, or the first CH3 domain further comprises L351D and L368E substitutions and the second CH3 domain further comprises L351K and T366K substitutions; or (iv) the first CH3 domain further comprises P395K. P396K and V397K substitutions and the second CH3 domain comprises T394D, P395D and P3% D substitutions, or the first CH3 domain further comprises T394D, P395D and P3% D substitutions and the second CH3 domain further comprises P395K, P396K and V397K substitutions; or (v) the first CH3 domain further comprises F405E, Y407E and K409E substitutions and the second CH3 domain comprises F405K and Y407K substitutions, or the first CH3 domain further comprises F405K and Y407K substitutions and the second CH3 domain further comprises F405E, Y407E and K409E substitutions.

[0011] In some embodiments according to any one of the heterodimeric proteins described above, i) the first CH3 domain comprises E357K, S364K and N390C substitutions and the second CH3 domain comprises L351D, K370D, and S400C substitutions, or the first CH3 domain comprises L351D, K370D, and S400C substitutions and the second CH3 domain comprises E357K, S364K and N390C substitutions; or ii) the first CH3 domain comprises E357K, S364K and S400C substitutions and the second CH3 domain comprises L351D, K370D, and N390C substitutions, or the first CH3 domain comprises L351D, K370D, and N390C substitutions and the second CH3 domain comprises E357K, S364K and S400C substitutions; or iii) the first CH3 domain comprises D356K, E357K, S364K and S400C substitutions and the second CH3 domain comprises L351D, K370D, N390C and K439D substitutions, or the first CH3 domain comprises L351D, K370D, N390C and K439D substitutions and the second CH3 domain comprises D356K, E357K, S364K and S400C substitutions; or iv) the first CH3 domain comprises D356K, E357K, S364K and N390C substitutions and the second CH3 domain comprises L351D, K370D, K439D and S400C substitutions, or the first CH3 domain comprises L351D, K370D, K439D and S400C substitutions and the second CH3 domain comprises D356K, E357K, S364K and N390C substitutions.

[0012] In some embodiments according to any one of the heterodimeric proteins described above, the first CH3 domain and the second CH3 domain further comprise knob-into-hole residues. In some embodiments, i) the first CH3 domain comprises T336S, L368A and Y407V substitutions and the second CH3 domain comprises T366W substitution, or the first CH3 domain comprises T366W substitution and the second CH3 domain comprises T336S, L368A and Y407V substitutions; or ii) the first CH3 domain comprises L368V and Y407V substitutions and the second CH3 domain comprises T366W substitution, or the first CH3 domain comprises T366W substitution and the second CH3 domain comprises L368V and Y407V substitutions.

[0013] Another aspect of the present application provides a heterodimeric protein comprising a first polypeptide comprising a first CH3 domain and a second polypeptide comprising a second CH3 domain, wherein: i) the first CH3 domain comprises a positively charged residue at position 357 and the second CH3 domain comprises a negatively charged residue at position 351, or the first CH3 domain comprises a negatively charged residue at position 351 and the second CH3 domain comprises a positively charged residue at position 357; or ii) the first CH3 domain comprises a positively charged residue at position 411 and the second CH3 domain comprises a negatively charged residue at position 370, or the first CH3 domain comprises a negatively charged residue at position 370 and the second CH3 domain comprises a positively charged residue at position 411; or iii) the first CH3 domain comprises a positively charged residue at position 364 and the second CH3 domain comprises a negatively charged residue at position 370, or the first CH3 domain comprises a negatively charged residue at position 370 and the second CH3 domain comprises a positively charged residue at position 364; and wherein the amino acid residue numbering is based on EU numbering. In some embodiments, the first CH3 domain comprises a positively charged residue at position 356 and the second CH3 domain comprises a negatively charged residue at position 439, or first CH3 domain comprises a negatively charged residue at position 439 and the second CH3 domain comprises a positively charged residue at position 356; and wherein the amino acid residue numbering is based on EU numbering. In some embodiments, i) the positively charged residue is a lysine (K) residue, and the negatively charged residue is an aspartic acid (D) residue; or ii) the positively charged residue is a lysine (K) residue, and the negatively charged residue is a glutamic acid (E) residue; or iii) the positively charged residue is an arginine (R) residue, and the negatively charged residue is an aspartic acid (D) residue; or iv) the positively charged residue is an arginine (R) residue, and the negatively charged residue is a glutamic acid (E) residue. In some embodiments, i) the first CH3 domain comprises E357K and T411K substitutions and the second CH3 domain comprises L351D and K370D substitutions, or the first CH3 domain comprises L351D and K370D substitutions and the second CH3 domain comprises E357K and T411K substitutions; or ii) the first CH3 domain comprises E357K and S364K substitutions and the second CH3 domain comprises L351 D and K370D substitutions, or the first CH3 domain comprises L351D and K370D substitutions and the second CH3 domain comprises E357K and S364K substitutions; or iii) the first CH3 domain comprises D356K, E357K and S364K substitutions and the second CH3 domain comprises L351D, K370D and K439D substitutions, or the first CH3 domain comprises L351D, K370D and K439D substitutions and the second CH3 domain comprises D356K, E357K and S364K substitutions.

[0014] In some embodiments according to any one of the heterodimeric proteins described above, i) the first CH3 domain further comprises K392C substitution and the second CH3 domain further comprises D399C substitution, or the first CH3 domain further comprises D399C substitution and the second CH3 domain further comprises K392C substitution; or ii) the first CH3 domain further comprises Y394C substitution and the second CH3 domain further comprises S354C substitution, or the first CH3 domain further comprises S354C substitution and the second CH3 domain further comprises Y394C substitution; or iii) the first CH3 domain further comprises D356C substitution and the second CH3 domain further comprises Y349C substitution, or the first CH3 domain further comprises Y349C substitution and the second CH3 domain further comprises D356C substitution.

[0015] In some embodiments according to any one of the heterodimeric proteins described above, the first CH3 domain and the second CH3 domain are human CH3 domains.

[0016] In some embodiments according to any one of the heterodimeric proteins described above, the first polypeptide and the second polypeptide each comprises from the N-terminus to the C-terminus at least a portion of an immunoglobulin hinge region, an immunoglobulin heavy chain constant domain 2 (CH2 domain), and the CH3 domain. In some embodiments, the CH2 domains and the CH3 domains form an IgG Fc region. In some embodiments, the Fc region is of the human IgG1 subclass. In some embodiments, the Fc region is of the human IgG4 subclass. In some embodiments, the Fc region further comprises S228P substitution. In some embodiments, the Fc region further comprises N297A substitution.

[0017] In some embodiments according to any one of the heterodimeric proteins described above, the first polypeptide and the second polypeptide are antibody heavy chains. In some embodiments, the heterodimeric protein further comprises the heterodimeric protein further comprises one or more antibody light chains. In some embodiments, the heterodimeric protein is a multispecific antibody.

[0018] In some embodiments according to any one of the heterodimeric proteins described above, the heterodimeric protein further comprises a third polypeptide and a fourth polypeptide, wherein:

[0019] (i) the first polypeptide comprises a structure represented by the formula:

VH1-CH1-hinge-CH2-first CH3-L1-scFv1 (Ia);

[0020] (ii) the second polypeptide comprises a structure represented by the formula:

VH2-CH1-hinge-CH2-second CH3-L2-scFv2 (IIa);

[0021] (iii) the third polypeptide comprises a structure represented by the formula:

VL1-CL (Ib); and

[0022] (iv) the fourth polypeptide comprises a structure represented by the formula

VL2-CL (IIb);

wherein VL1 is a first immunoglobulin light chain variable domain; VH1 is a first immunoglobulin heavy chain variable domain; VL2 is a second immunoglobulin light chain variable domain; VH2 is a second immunoglobulin heavy chain variable domain; scFv1 is a first single-chain variable fragment; scFv2 is a second single-chain variable fragment; CL is an immunoglobulin light chain constant domain; CH1 is an immunoglobulin heavy chain constant domain 1; CH2 is an immunoglobulin heavy chain constant domain 2; hinge is an immunoglobulin hinge region connecting the CH1 and CH2 domains; and L1 and L2 is each independently a bond or a peptide linker; wherein VL1 and VH1 associate to form a first Fv that specifically binds to a first target; wherein VL2 and VH2 associate to form a second Fv that specifically binds to a second target; wherein scFv1 specifically binds to a third target; and wherein scFv2 specifically binds to a fourth target. In some embodiments, scFv1 and scFv2 are identical. In some embodiments, the first Fv and the second Fv are identical. In some embodiments, the first Fv and the second Fv are different. In some embodiments, the first Fv specifically binds PDL1, the second Fv specifically binds CD137, and scFv1 and scFv2 specifically bind CTLA-4. In some embodiments, scFv1 and/or scFv2 comprises from the N-terminus to the C-terminus: VH-L-VL, wherein L is a peptide linker. In some embodiments, scFv1 and/or scFv2 comprises a first cysteine residue at position 44 in the VH and a second cysteine residue at position 100 in the VL, wherein the first cysteine residue and the second cysteine residue form a disulfide bond. In some embodiments, L1 and/or L2 is a peptide linker comprising the amino acid sequence of SEQ ID NO: 80 or SEQ ID NO: 81. In some embodiments, VL1 and VL2 are identical. In some embodiments, VL1 and VL2 are different.

[0023] In some embodiments according to any one of the heterodimeric proteins described above, the heterodimeric protein comprises a first polypeptide, a second polypeptide and a third polypeptide, wherein:

[0024] (i) the first polypeptide comprises a structure represented by the formula:

VH-CH1-hinge-CH2-first CH3 (IIIa);

[0025] (ii) the second polypeptide comprises a structure represented by the formula:

scFv-hinge-CH2-second CH3 (IVa); and

[0026] (iii) the third polypeptide comprises a structure represented by the formula:

VL-CL (IIIb);

wherein VL is an immunoglobulin light chain variable domain; VH is an immunoglobulin heavy chain variable domain; scFv is a single-chain variable fragment; CL is an immunoglobulin light chain constant domain; CH1 is an immunoglobulin heavy chain constant domain 1; CH2 is an immunoglobulin heavy chain constant domain 2; and hinge is an immunoglobulin hinge region connecting the CH1 and CH2 domains; wherein VL and VH associate to form an Fv that specifically binds to a first target; and wherein the scFv specifically binds to a second target. In some embodiments, the first target is a tumor antigen, and the second target is CD3. In some embodiments, the first target is HER2. In some embodiments, the first target is a first immune checkpoint molecule, and the second target is a second immune checkpoint molecule. In some embodiments, the first target is PDL1 and the second target is CD137. In some embodiments, the first target is CD137 and the second target is PDL1. In some embodiments, the scFv comprises from the N-terminus to the C-terminus: VH-L-VL, wherein L is a peptide linker. In some embodiments, the scFv comprises a first cysteine residue at position 44 in the VH and a second cysteine residue at position 100 in the VL, wherein the first cysteine residue and the second cysteine residue form a disulfide bond. In some embodiments, the scFv is fused to the hinge in the second polypeptide via a peptide linker comprising the amino acid sequence of SEQ ID NO: 80 or SEQ ID NO: 81.

[0027] In some embodiments according to any one of the heterodimeric proteins described above, the heterodimeric protein is an activatable antibody, wherein the heterodimeric protein comprises a first polypeptide, a second polypeptide and a third polypeptide, and wherein:

[0028] (i) the first polypeptide comprises a structure represented by the formula:

VH-CH1-hinge-CH2-first CH3 (Va);

[0029] (ii) the second polypeptide comprises a structure represented by the formula:

MM1-CM1-scFv-hinge-CH2-second CH3 (VIa); and

[0030] (iii) the third polypeptide comprises a structure represented by the formula:

MM2-CM2-VL-CL (IVb);

wherein VL is an immunoglobulin light chain variable domain; VH is an immunoglobulin heavy chain variable domain; scFv is a single-chain variable fragment; CL is an immunoglobulin light chain constant domain; CH1 is an immunoglobulin heavy chain constant domain 1; CH2 is an immunoglobulin heavy chain constant domain 2; hinge is an immunoglobulin hinge region connecting the CH1 and CH2 domains; MM1 is a first masking peptide; MM2 is a second masking peptide; CM1 is a first cleavable peptide; and CM2 is a second cleavable peptide; wherein VL and VH associate to form a first Fv that specifically binds to a first target; wherein the scFv specifically binds to a second target; wherein MM1 inhibits the binding of the first Fv to the first target when CM1 is not cleaved; and wherein MM2 inhibits the binding of the scFv to the second target when CM2 is not cleaved. In some embodiments, the first target is a tumor antigen, and the second target is CD3. In some embodiments, MM1 comprises the amino acid sequence of SEQ ID NO: 35. In some embodiments, the first Fv comprises a VH comprising an CDR-H1 comprising the amino acid sequence of SEQ ID NO: 61, a CDR-H2 comprising the amino acid sequence of SEQ ID NO: 62, and/or a CDR-H3 comprising the amino acid sequence of SEQ ID NO: 63. In some embodiments, the TBM comprises a VL comprising a CDR-L1 comprising the amino acid sequence of SEQ ID NO: 64, a CDR-L2 comprising the amino acid sequence of SEQ ID NO: 65, and/or a CDR-L3 comprising the amino acid sequence of SEQ ID NO: 66. In some embodiments, the first target is HER2. In some embodiments, MM2 comprises the amino acid sequence of SEQ ID NO: 36. In some embodiments, the scFv comprises a VH comprising an CDR-H1 comprising the amino acid sequence of SEQ ID NO: 69, a CDR-H2 comprising the amino acid sequence of SEQ ID NO: 70, and/or a CDR-H3 comprising the amino acid sequence of SEQ ID NO: 71. In some embodiments, the TBM comprises a VL comprising a CDR-L1 comprising the amino acid sequence of SEQ ID NO: 72, a CDR-L2 comprising the amino acid sequence of SEQ ID NO: 73, and/or a CDR-L3 comprising the amino acid sequence of SEQ ID NO: 74.

[0031] One aspect of the present application provides an activatable antibody comprising: a first polypeptide comprising, from N-terminus to C-terminus, a masking moiety (MM), a cleavable moiety (CM), and a target binding moiety (TBM), wherein the MM comprises the amino acid sequence of SEQ ID NO: 35; wherein the MM inhibits binding of the activatable antibody to human CD3 when the CM is not cleaved; wherein the CM comprises at least a first cleavage site; and wherein: a) the TBM comprises a VL and the activatable antibody further comprises a second polypeptide comprising a VH; b) the TBM comprises a VH and the activatable antibody further comprises a second polypeptide comprising a VL; c) the TBM comprises from the N-terminus to the C-terminus, a VL and a VH; or d) the TBM comprise from the N-terminus to the C-terminus, a VH and a VL; and wherein the activatable antibody binds to human CD3 via the VH and VL when the CM is cleaved. In some embodiments, the TBM comprises a VH comprising an CDR-H1 comprising the amino acid sequence of SEQ ID NO: 61, a CDR-H2 comprising the amino acid sequence of SEQ ID NO: 62, and/or a CDR-H3 comprising the amino acid sequence of SEQ ID NO: 63. In some embodiments, the TBM comprises a VL comprising a CDR-L1 comprising the amino acid sequence of SEQ ID NO: 64, a CDR-L2 comprising the amino acid sequence of SEQ ID NO: 65, and/or a CDR-L3 comprising the amino acid sequence of SEQ ID NO: 66.

[0032] One aspect of the present application provides an activatable antibody comprising: a first polypeptide comprising, from N-terminus to C-terminus, a masking moiety (MM), a cleavable moiety (CM), and a target binding moiety (TBM), wherein the MM comprises the amino acid sequence of SEQ ID NO: 36; wherein the MM inhibits binding of the activatable antibody to human HER2 when the CM is not cleaved; wherein the CM comprises at least a first cleavage site; and wherein a) the TBM comprises a VL and the activatable antibody further comprises a second polypeptide comprising a VH; b) the TBM comprises a VH and the activatable antibody further comprises a second polypeptide comprising a VL; c) the TBM comprises from the N-terminus to the C-terminus, a VL and a VH; or d) the TBM comprise from the N-terminus to the C-terminus, a VH and a VL; and wherein the activatable antibody binds to human HER2 via the VH and VL when the CM is cleaved. In some embodiments, the TBM comprises a VH comprising an CDR-H1 comprising the amino acid sequence of SEQ ID NO: 69, a CDR-H2 comprising the amino acid sequence of SEQ ID NO: 70, and/or a CDR-H3 comprising the amino acid sequence of SEQ ID NO: 71. In some embodiments, the TBM comprises a VL comprising a CDR-L1 comprising the amino acid sequence of SEQ ID NO: 72, a CDR-L2 comprising the amino acid sequence of SEQ ID NO: 73, and/or a CDR-L3 comprising the amino acid sequence of SEQ ID NO: 74.

[0033] In some embodiments according to any one of activatable antibodies described above, the activatable antibody comprises a first polypeptide, a second polypeptide and a third polypeptide, wherein:

[0034] (i) the first polypeptide comprises a structure represented by the formula:

VH-CH1-hinge-CH2-first CH3 (Va);

[0035] (ii) the second polypeptide comprises a structure represented by the formula:

MM1-CM1-scFv-hinge-CH2-second CH3 (VIa); and

[0036] (iii) the third polypeptide comprises a structure represented by the formula:

MM2-CM2-VL-CL (IVb);

[0037] wherein:
[0038] VL is an immunoglobulin light chain variable domain;
[0039] VH is an immunoglobulin heavy chain variable domain;
[0040] scFv is a single-chain variable fragment;
[0041] CL is an immunoglobulin light chain constant domain;
[0042] CH1 is an immunoglobulin heavy chain constant domain 1;
   [0043] CH2 is an immunoglobulin heavy chain constant domain 2;
   [0044] hinge is an immunoglobulin hinge region connecting the CH1 and CH2 domains;
   [0045] MM1 is a first masking peptide;
   [0046] MM2 is a second masking peptide;
   [0047] CM1 is a first cleavable peptide; and
   [0048] CM2 is a second cleavable peptide;
      wherein VL and VH associate to form a first Fv that specifically binds to a first target; wherein the scFv specifically binds to a second target; and wherein MM is MM1 or MM2.

[0049] In some embodiments according to any one of activatable antibodies described above, the activatable antibody comprises an Fc region comprising a first CH3 domain and a second CH3 domain, wherein the first CH3 domain comprises D356K, E357K, S364K and S400C substitutions and the second CH3 domain comprises L351D, K370D, N390C and K439D substitutions, or the first CH3 domain comprises L351D, K370D, N390C and K439D substitutions and the second CH3 domain comprises D356K, E357K, S364K and S400C substitutions.

[0050] One aspect of the present application provides one or more nucleic acid(s) encoding the heterodimeric protein according to any one of the heterodimeric proteins described above or the activatable antibody according to any one of the activatable antibodies described above, vector(s) comprising the one or more nucleic acids, and a host cell comprising the one or more nucleic acids or the vector. In some embodiments, there is provided a method for preparing a heterodimeric protein or an activatable antibody, comprising: (a) culturing the host cell according to any one of the host cells described above under conditions that allow expression of the one or more nucleic acid(s) or vector; and (b) recovering the heterodimeric protein or the activatable antibody from the host cell culture.

[0051] One aspect of the present application provides a pharmaceutical composition comprising the heterodimeric protein according to any one of the heterodimeric proteins described above or the activatable antibodies according to any one of the activatable antibodies described above, and a pharmaceutically acceptable carrier.

[0052] One aspect of the present application provides a method for treating a disease or condition in a subject in need thereof, comprising administering to the subject an effective amount of the pharmaceutical composition according to any one of the pharmaceutical compositions described above. In some embodiments, the disease or condition is cancer. In some embodiments, the cancer is lung cancer. In some embodiments, the cancer is a HER-2 positive cancer. In some embodiments, the cancer is ovarian cancer. In some embodiments, the cancer is prostate cancer or melanoma. In some embodiments, the cancer is an advanced-stage cancer.

[0053] Compositions, uses, kits and articles of manufacture comprising any one of the heterodimeric proteins described above are also provided.

### BRIEF DESCRIPTION OF THE DRAWINGS

[0054] FIGS. 1-5 provide schematic diagrams of exemplary antibody designs of the present application.

[0055] FIG. 1A shows a Fab-Fc/Fc one-armed scaffold schematic. FIG. 1B shows a common light chain scaffold schematic.

[0056] FIG. 2 shows a Morrison format bispecific scaffold schematic. Shown at right are PD-L1×CD137 and CD137×PD-L1 bispecific antibodies in the Morrison format.

[0057] FIG. 3 shows trispecific scaffold schematics, including, at right, a trispecific antibody to PD-L1, CD137, and CTLA4.

[0058] FIG. 4 shows ScFv bispecific scaffold schematics, including, at right, a HER2 and CD3 bispecific antibody schematic.

[0059] FIG. 5 shows activatable scaffold schematics, including, at right, a schematic of an activatable antibody to HER2 and CD3. The masking peptide (represented as a ball) can be fused to the antigen-binding domain via a cleavable linker.

[0060] FIG. 6 provides 10% SDS-PAGE gels showing the yields of heterodimeric proteins. The three bands correspond to light chain-heavy chain homodimers, light chain-heavy chain-Fc heterodimers, and light chain-heavy chain half-bodies, as indicated.

[0061] FIG. 7 provides size-exclusion high-performance liquid chromatography data of heterodimeric proteins. Time is on the x-axis, and relative protein abundance is on the y-axis. The stars indicate peaks corresponding to heterodimeric proteins.

[0062] FIG. 8 provides analyzed size-exclusion high-performance liquid chromatography data showing heterodimeric proteins after 1-hour incubations at the temperatures indicated. The x-axis indicates temperature (from left to right, a control, 40° C., 50° C., 60° C., 65′C, or 67.5° C.), and the y-axis indicates the peak area corresponding to the heterodimeric protein post incubation relative to that of control (without incubation).

[0063] FIG. 9 provides size-exclusion high-performance liquid chromatography spectra of heterodimeric proteins after storage at 4° C. or 37C for 7, 14, 21, or 28 days, as indicated. Time is on the x-axis, and relative protein abundance is on the y-axis.

[0064] FIG. 10 shows the effects of bispecific antibodies in an NFκB activation luciferase reporter assay. The x-axis indicates the log-transformed concentration of antibody in nM, and the y-axis indicates relative luminescence units (“RLU”) of the luciferase reporter.

[0065] FIGS. 11A-11C provide an evaluation of the quality of purified anti-PDL1 and CD137 bispecific antibodies of different formats. FIG. 11A shows protein quality evaluated by analytical size-exclusion chromatography after for 3 and 6 freeze-thaw cycles. FIG. 11B shows protein quality evaluated by analytical size-exclusion chromatography after incubation at 40° C. for 28 days. In FIG. 11A and FIG. 11B, time is on the x-axis, and relative protein abundance is on the y-axis, and the format of the bispecific antibody is indicated. FIG. 11C provides an analysis of the thermal stability of purified anti-PDL1 and CD137 bispecific antibodies of different formats. Antibodies were incubated for one hour at the temperature indicated on the x-axis (from left to right, a control, 50 C, 60° C., 65° C., and 70 C), and the y-axis indicates the percentage of main peak area. In FIG. 11C, PDL1×CD137 TYF01 is indicated as squares, CD137×PDL1 TYF01 is shown as circles, PDL1×CD137 TYF02 is shown as upward-pointing triangles, and CD137×PDL1 TYF02 is shown as downward-pointing triangles.

[0066] FIG. 12 provides a flow cytometry analysis of binding of anti-PDL1×CD137 bispecific antibodies to PDL1 and CD137. The x-axis of each plot shows antigen display in the APC channel, and the y-axis shows ligand binding in the PE channel.

[0067] FIG. 13 provides a flow cytometry analysis of anti-PDL1 and CD137 bispecific antibodies binding and cross-reacting. TYF01 antibodies are shown on the top set of plots, and TYF02 antibodies are shown on the bottom set of plots. The x-axis of each plot shows antigen display in the FITC channel, and the y-axis shows antibody binding in the APC channel. The ability of the bispecific antibodies of different formats to bind PDL1 or CD137 of mouse, monkey, or human origin was tested, as indicated.

[0068] FIG. 14 provides the effect of PDL1×CD137 and CD137×PDL1 bispecific antibodies on PDL1 and CD137 reporter gene assays. The top plot shows a PDL1 reporter gene assay, with the log-transformed concentration of antibody on the x-axis in ng/ml, and the relative luminescence units (“RUL”) on the y-axis. In the PDL1 reporter gene assay plot, squares indicate PDL1×CTLA4 bispecific antibody, downward-facing triangles indicate PDL1 monomer, circles indicate PDL1×CD137 bispecific antibody, and upward-facing triangles indicate CD137×PDL1 bispecific antibody. The lower plot shows a CD137-NFκB reporter gene assay, with the concentration of antibody on the x-axis in nM, and the relative luminescence units (“RLU”) on the y-axis. In the CD137-NFκB reporter assay plot, squares indicate PDL1×CD137 bispecific antibody, upward-facing triangles indicate CD137×PDL1 bispecific antibody, diamonds indicate CD137×CTLA4 bispecific antibody, downward-facing triangles indicate CD137 monomer, and circles indicate a negative control.

[0069] FIGS. 15A-15C show the effect of anti-PDL1 and/or anti-CD137 antibodies on tumor growth in vivo in a 3LL syngeneic mouse model. In each of FIG. 15A, FIG. 15B, and FIG. 15C the x-axis indicates the number of days after the start of treatment, and the y-axis indicates the tumor volume in mm. Mono-IgG, bispecific or trispecific antibodies were tested alone or in combination at the concentrations indicated.

[0070] FIG. 16 provides a characterization of bispecific antibodies through SDS-PAGE electrophoresis. The left gel is a 12% SDS-PAGE gel under reducing conditions, and the right gel is a 4-15% SDS-PAGE gel under non-reducing conditions. The MW lane shows molecular weight markers, which are labeled in kilodaltons to the left of each gel. In both gels, lane 1 shows antibody TY24051, lane 2 shows antibody TY24052, and lane 3 shows antibody TY24053.

[0071] FIG. 17 provides size-exclusion high-performance liquid chromatography analyses of bispecific antibodies. The upper plot shows antibody TY24051, the middle plot shows antibody TY24105, and the lower plot shows antibody TY24106. In each plot, time is on the x-axis, and relative protein abundance is on the y-axis. Peaks corresponding to heterodimeric proteins and aggregates are indicated.

[0072] FIGS. 18A-18B provide enzyme-linked immunosorbent assay (ELISA) analyses of antibodies TY24051 and TY24052. FIG. 18A shows binding of HER2 by TY24051 (squares), TY24052 (triangles pointing up), and TY24052 after activation (triangles pointing down). FIG. 18B shows binding of CD3 by TY24051 (squares), TY24052 (triangles pointing up), and TY24052 after activation (triangles pointing down). In both FIG. 18A and FIG. 18B, the concentration of antibody is on the x-axis in M, and the absorbance at 450 nm is on the y-axis.

[0073] FIG. 19 shows an assay of T-cell mediated cytotoxic killing upon treatment with bispecific antibodies. The concentration of antibody (ng/ml) is shown on the x-axis, and the percentage of cell lysis is shown on the y-axis. Target cells were incubated with T cells for 24 hours with TY24051 (circles), TY24052 (squares), an isotype control (triangles pointing up), or without an antibody (triangles pointing down).

### DETAILED DESCRIPTION OF THE INVENTION

[0074] The present application provides heterodimeric proteins comprising CH3 domains having engineered disulfide bond(s) and/or salt bridge(s), including multispecific antibodies such as bispecific antibodies comprising an Fc region having the engineered disulfide bond(s) and/or salt bridge(s). In some embodiments, the heterodimeric protein comprises an engineered disulfide bond between C390 in a first CH3 domain and C400 in a second CH3 domain, between C392 in a first CH3 domain and C397 in a second CH3 domain, or between C392 in a first CH3 domain and C400 in a second CH3 domain. In some embodiments, the heterodimeric protein comprises a rearranged salt-bridge network as compared to wildtype CH3 domains, e.g., among positions 357 and 411 in a first CH3 domain and positions 351 and 370 in a second CH3 domain (e.g., E357K:T411K-L351′D:K370′D), or among positions 357 and 364 in a first CH3 domain and positions 351 and 370 in a second CH3 domain (e.g., E357K:S364K-L351′D:K370′D). In some embodiments, the heterodimeric protein comprises an inversed salt bridge as compared to wildtype CH3 domains between position 356 in a first CH3 domain and position 439 in a second CH3 domain (e.g., D356-K439′). The heterodimeric proteins described herein provide a platform for preparing various formats of multispecific proteins and antibodies with high yield, superior stability (e.g., resistance to aggregation and precipitation at high temperature or due to freeze-thaw cycles), and potent activity.

### I. DEFINITIONS

[0075] Terms are used herein as generally used in the art, unless otherwise defined as follows.

[0076] The term “antibody” herein is used in the broadest sense and encompasses various antibody structures, including but not limited to monoclonal antibodies, polyclonal antibodies, multispecific antibodies (e.g., bispecific antibodies), and antibody fragments so long as they exhibit the desired antigen-binding activity.

[0077] The term “antibody” includes, but is not limited to, fragments that are capable of binding antigen, such as Fv, Fab, Fab′, and (Fab′)₂. Papain digestion of antibodies produces two identical antigen-binding fragments, called “Fab” fragments, each with a single antigen-binding site, and a residual “Fc” fragment, whose name reflects its ability to crystallize readily. Pepsin treatment yields an F(ab′)₂ fragment that has two antigen-combining sites and is still capable of cross-linking antigen. The term antibody also includes, but is not limited to, chimeric antibodies, humanized antibodies, and antibodies of various species such as mouse, human, cynomolgus monkey, etc.

[0078] The term “antigen-binding fragment” refers to one or more portions of an antibody that retain the ability to bind to the antigen of the antibody. Examples of “antigen-binding fragment” of an antibody include, but are not limited to, (i) a Fab fragment, a monovalent fragment consisting of the VL, VH. CL and CH1 domains; (ii) a F(ab′)₂ fragment, a bivalent fragment comprising two Fab fragments linked by a disulfide bridge at the hinge region; (iii) a Fv fragment consisting of the VL and VH domains of a single arm of an antibody, (v) a single chain Fv fragment comprising the VH and VL domains of an antibody, and the VH and VL domains are fused to each other; and (vi) a single chain Fab fragment comprising a single polypeptide comprising the VL, VH, CL and CH1 domains.

[0079] The term “monoclonal antibody” as used herein refers to an antibody obtained from a population of substantially homogeneous antibodies, i.e., the individual antibodies comprising the population are identical and/or bind the same epitope, except for possible variant antibodies, e.g., containing naturally occurring mutations or arising during production of a monoclonal antibody preparation, such variants generally being present in minor amounts. In contrast to polyclonal antibody preparations, which typically include different antibodies directed against different determinants (epitopes), each monoclonal antibody of a monoclonal antibody preparation is directed against a single determinant on an antigen. Thus, the modifier “monoclonal” indicates the character of the antibody as being obtained from a substantially homogeneous population of antibodies, and is not to be construed as requiring production of the antibody by any particular method. For example, the monoclonal antibodies to be used in accordance with the present invention may be made by a variety of techniques, including but not limited to the hybridoma method, recombinant DNA methods, phage-display methods, and methods utilizing transgenic animals containing all or part of the human immunoglobulin loci, such methods and other exemplary methods for making monoclonal antibodies being described herein.

[0080] The term “hypervariable region” or “HVR,” as used herein, refers to each of the regions of an antibody variable domain, which are hypervariable in sequence. HVRs may form structurally defined loops (“hypervariable loops”). Generally, native four-chain antibodies comprise six HVRs; three in the VH (H1, H2, H3), and three in the VL (L1, L2, L3). HVRs generally comprise amino acid residues from the hypervariable loops and/or from the “complementarity determining regions” (CDRs), CDRs being of highest sequence variability and/or involved in antigen recognition. Exemplary hypervariable loops occur at amino acid residues 26-32 (L1), 50-52 (L2), 91-96 (L3), 26-32 (H1), 53-55 (H2), and 96-101 (H3). (Chothia and Lesk, J. Mol. Biol. 196:901-917 (1987).) Exemplary CDRs (CDR-L1, CDR-L2, CDR-L3, CDR-H1, CDR-H2, and CDR-H3) occur at amino acid residues 24-34 of L1, 50-56 of L2, 89-97 of L3, 31-35B of H1, 50-65 of H2, and 95-102 of H3. (Kabat et al., Sequences of Proteins of Immunological Interest, 5th Ed. Public Health Service, National Institutes of Health, Bethesda, Md. (1991)) With the exception of CDR1 in VH, CDRs generally comprise the amino acid residues that form the hypervariable loops. CDRs also comprise “specificity determining residues,” or “SDRs,” which are residues that contact antigen. SDRs are contained within regions of the CDRs called abbreviated-CDRs, or a-CDRs. Exemplary a-CDRs (a-CDR-L1, a-CDR-L2, a-CDR-L3, a-CDR-H1, a-CDR-H2, and a-CDR-H3) occur at amino acid residues 31-34 of L1, 50-55 of L2, 89-96 of L3, 31-35B of H1, 50-58 of H2, and 95-102 of H3. (See Almagro and Fransson, Front. Biosci. 13:1619-1633 (2008)). Unless otherwise indicated, HVR residues and other residues in the variable domain (e.g., FR residues) are numbered herein according to Kabat et al., supra.

[0081] The term “variable region” or “variable domain” refers to the domain of an antibody heavy or light chain that is involved in binding the antibody to antigen. The variable domains of the heavy chain and light chain (VH and VL, respectively) of a native antibody generally have similar structures, with each domain comprising four framework regions (FRs) and three hypervariable regions (HVRs), arranged from amino-terminus to carboxy-terminus in the following order: FR1, HVR1, FR2, HVR2, FR3, HVR3, FR4. (See, e.g., Kindt et al. Kuby Immunology, 6th ed., W.H. Freeman and Co., page 91 (2007).) A single VH or VL domain may be sufficient to confer antigen-binding specificity. Furthermore, antibodies that bind a particular antigen may be isolated using a VH or VL domain from an antibody that binds the antigen to screen a library of complementary VL or VH domains, respectively. See, e.g., Portolano et al., J. Immunol. 150:880-887 (1993); Clarkson et al., Nature 352:624-628 (1991).

[0082] The term “EU numbering” or “amino acid position numbering based on EU numbering,” and variations thereof, refers to the numbering system used for heavy chain constant domains of the compilation of antibodies in Edelman, G. M. et al., Proc. Natl. Acad. USA, 63, 78-85 (1969). The EU numbering of residues may be determined for a given antibody by alignment at regions of homology of the sequence of the antibody with a “standard” EU numbered sequence.

[0083] The Kabat numbering system is generally used when referring to a residue in the variable domain (approximately residues 1-107 of the light chain and residues 1-113 of the heavy chain) (e.g., Kabat et al., Sequences of Immunological Interest. 5th Ed. Public Health Service, National Institutes of Health, Bethesda, Md. (1991)). Using this numbering system, the actual linear amino acid sequence may contain fewer or additional amino acids corresponding to a shortening of, or insertion into, a FR or HVR of the variable domain. For example, a heavy chain variable domain may include a single amino acid insert (residue 52a according to Kabat) after residue 52 of H2 and inserted residues (e.g. residues 82a, 82b, and 82c, etc. according to Kabat) after heavy chain FR residue 82. The Kabat numbering of residues may be determined for a given antibody by alignment at regions of homology of the sequence of the antibody with a “standard” Kabat numbered sequence.

[0084] With respect to a heterodimeric protein having two CH3 domains, a given amino acid position of a first CH3 domain is referred to as X, and the corresponding amino acid position of the second CH3 domain is referred to as X′. For example, N390C-S400′C refers to a heterodimeric protein having a first CH3 domain having a N390C mutation and a second CH3 domain having a S400C mutation. All mutations or substitutions in the heterodimeric proteins described herein are referred herein with respect to a wildtype, naturally occurring CH3 domain.

[0085] Unless indicated otherwise, all formula of polypeptide chains described herein list the components of the polypeptide in the order from the N-terminus to the C-terminus. For example, the formula VH1-CH I-hinge-CH2-first CH3-L1-scFv1 indicates that the polypeptide comprises, from the N-terminus to the C-terminus, the following structural components: VH1, CH1, hinge, CH2, first CH3, L1 and scFv1.

[0086] The term “heavy chain constant region” as used herein refers to a region comprising at least three heavy chain constant domains, CH1, CH2, and CH3, and a hinge region between CH1 and CH2. Non-limiting exemplary heavy chain constant regions include γ, δ, and α. Non-limiting exemplary heavy chain constant regions also include ε and μ. Each heavy constant region corresponds to an antibody isotype. For example, an antibody comprising a γ constant region is an IgG antibody, an antibody comprising a δ constant region is an IgD antibody, and an antibody comprising an α constant region is an IgA antibody. Further, an antibody comprising a μ constant region is an IgM antibody, and an antibody comprising an ε constant region is an IgE antibody. Certain isotypes can be further subdivided into subclasses. For example, IgG antibodies include, but are not limited to, IgG1 (comprising a γ₁ constant region), IgG2 (comprising a γ₂ constant region), IgG3 (comprising a 73 constant region), and IgG4 (comprising a γ₄ constant region) antibodies; IgA antibodies include, but are not limited to, IgA1 (comprising an α₁ constant region) and IgA2 (comprising an α₂ constant region) antibodies; and IgM antibodies include, but are not limited to, IgM1 and IgM2.

[0087] The term “CH2 domain” of a human IgG Fc region usually extends from about residues 231 to about 340 of the IgG according to the EU numbering system. The CH2 domain is unique in that it is not closely paired with another domain. Rather, two N-linked branched carbohydrate chains are interposed between the two CH2 domains of an intact native IgG molecule. It has been speculated that the carbohydrate may provide a substitute for the domain-domain pairing and help stabilize the CH2 domain. Burton, Molec. Immunol. 22:161-206 (1985).

[0088] The term “CH3 domain” comprises the stretch of residues C-terminal to a CH2 domain in an Fc region (i.e., from about amino acid residue 341 to about amino acid residue 447 of an IgG according to the EU numbering system).

[0089] The term “heavy chain” as used herein refers to a polypeptide comprising at least a heavy chain variable region, with or without a leader sequence. In some embodiments, a heavy chain comprises at least a portion of a heavy chain constant region. The term “full-length heavy chain” as used herein refers to a polypeptide comprising a heavy chain variable region and a heavy chain constant region, with or without a leader sequence.

[0090] The term “light chain constant region” as used herein refers to a region comprising a light chain constant domain, CL. Non-limiting exemplary light chain constant regions include λ and κ.

[0091] The term “light chain” as used herein refers to a polypeptide comprising at least a light chain variable region, with or without a leader sequence. In some embodiments, a light chain comprises at least a portion of a light chain constant region. The term “full-length light chain” as used herein refers to a polypeptide comprising a light chain variable region and a light chain constant region, with or without a leader sequence.

[0092] “Affinity” refers to the strength of the sum total of noncovalent interactions between a binding site of a molecule (e.g., an antibody) and its binding partner (e.g., an antigen). The affinity of a molecule X for its partner Y can generally be represented by the dissociation constant (K_{d}). Affinity can be measured by common methods known in the art, including those described herein. In the context of a multispecific antibody (e.g., a bispecific or trispecific antibody), affinity of the antibody with each binding specificity (i.e. target) can be measured.

[0093] The term “binds”, “specifically binds to” or is “specific for” refers to measurable and reproducible interactions such as binding between a target and an antibody, which is determinative of the presence of the target in the presence of a heterogeneous population of molecules including biological molecules. For example, an antibody that binds to or specifically binds to a target (which can be an epitope) is an antibody that binds this target with greater affinity, avidity, more readily, and/or with greater duration than it binds to other targets. In some embodiments, the extent of binding of an antibody to an unrelated target is less than about 10% of the binding of the antibody to the target as measured, e.g., by a radioimmunoassay (RIA). In some embodiments, an antibody that specifically binds to a target has a dissociation constant (K_{d}) of ≤1 μM, ≤100 nM, ≤10 nM, ≤1 nM, or ≤0.1 nM. In some embodiments, an antibody specifically binds to an epitope on a protein that is conserved among the protein from different species. In some embodiments, specific binding can include, but does not require exclusive binding.

[0094] The term “multispecific” as used in conjunction with an antibody refers to an antibody having polyepitopic specificity (i.e., is capable of specifically binding to two, three, or more, different epitopes on one biological molecule or is capable of specifically binding to epitopes on two, three, or more, different biological molecules).

[0095] An “affinity matured” antibody refers to an antibody with one or more alterations in one or more hypervariable regions (HVRs) compared to a parent antibody, which does not possess such alterations, such alterations resulting in an improvement in the affinity of the antibody for antigen. In some examples, an affinity-matured antibody refers to an antibody with one or more alterations in one or more complementarity determining regions (CDRs) compared to a parent antibody, which does not possess such alterations, such alterations resulting in an improvement in the affinity of the antibody for antigen.

[0096] A “chimeric antibody” as used herein refers to an antibody in which a portion of the heavy and/or light chain is derived from a particular source or species, while the remainder of the heavy and/or light chain is derived from a different source or species. In some embodiments, a chimeric antibody refers to an antibody comprising at least one variable region from a first species (such as mouse, rat, cynomolgus monkey, etc.) and at least one constant region from a second species (such as human, cynomolgus monkey, etc.). In some embodiments, a chimeric antibody comprises at least one mouse variable region and at least one human constant region. In some embodiments, a chimeric antibody comprises at least one cynomolgus variable region and at least one human constant region. In some embodiments, all of the variable regions of a chimeric antibody are from a first species and all of the constant regions of the chimeric antibody are from a second species.

[0097] A “humanized antibody” as used herein refers to an antibody in which at least one amino acid in a framework region of a non-human variable region has been replaced with the corresponding amino acid from a human variable region. In some embodiments, a humanized antibody comprises at least one human constant region or fragment thereof. In some embodiments, a humanized antibody is an Fab, a (Fab′)₂, etc.

[0098] An “HVR-grafted antibody” as used herein refers to a humanized antibody in which one or more hypervariable regions (HVRs) of a first (non-human) species have been grafted onto the framework regions (FRs) of a second (human) species. In some examples, a “CDR-grafted antibody” as used herein refers to a humanized antibody in which one or more complementarity determining regions (CDRs) of a first (non-human) species have been grafted onto the framework regions (FRs) of a second (human) species.

[0099] A “human antibody” as used herein refers to antibodies produced in humans, antibodies produced in non-human animals that comprise human immunoglobulin genes, such as XENOMOUSE®, and antibodies selected using in vitro methods, such as phage display, wherein the antibody repertoire is based on a human immunoglobulin sequence.

[0100] The terms “nucleic acid molecule”, “nucleic acid” and “polynucleotide” may be used interchangeably, and refer to a polymer of nucleotides. Such polymers of nucleotides may contain natural and/or unnatural nucleotides, and include, but are not limited to, DNA, RNA, and PNA. “Nucleic acid sequence” refers to the linear sequence of nucleotides that comprise the nucleic acid molecule or polynucleotide.

[0101] The terms “polypeptide” and “peptide” are used interchangeably to refer to a polymer of amino acid residues, and are not limited to a minimum length. Such polymers of amino acid residues may contain natural or unnatural amino acid residues. Both full-length proteins and fragments thereof are encompassed by the definition. The terms also include post-expression modifications of the polypeptide, for example, glycosylation, sialylation, acetylation, phosphorylation, and the like. Furthermore, a “polypeptide” includes modifications, such as deletions, additions, and substitutions (generally conservative in nature), to the native sequence, as long as the polypeptide maintains the desired activity. These modifications may be deliberate, as through site-directed mutagenesis, or may be accidental, such as through mutations of hosts, which produce the proteins or errors due to PCR amplification.

[0102] A polypeptide “variant” means a biologically active polypeptide having at least about 80% amino acid sequence identity with the native sequence polypeptide after aligning the sequences and introducing gaps, if necessary, to achieve the maximum percent sequence identity, and not considering any conservative substitutions as part of the sequence identity. Such variants include, for instance, polypeptides wherein one or more amino acid residues are added, or deleted, at the N- or C-terminus of the polypeptide. In some embodiments, a variant will have at least about 80% amino acid sequence identity. In some embodiments, a variant will have at least about 90% amino acid sequence identity. In some embodiments, a variant will have at least about 95% amino acid sequence identity with the native sequence polypeptide.

[0103] As used herein. “percent (%) amino acid sequence identity” with respect to a peptide, polypeptide or antibody sequence are defined as the percentage of amino acid residues in a candidate sequence that are identical with the amino acid residues in the specific peptide or polypeptide sequence, after aligning the sequences and introducing gaps, if necessary, to achieve the maximum percent sequence identity, and not considering any conservative substitutions as part of the sequence identity. Alignment for purposes of determining percent amino acid sequence identity can be achieved in various ways that are within the skill in the art, for instance, using publicly available computer software such as BLAST, BLAST-2, ALIGN or MEGALIGN™ (DNASTAR) software. Those skilled in the art can determine appropriate parameters for measuring alignment, including any algorithms needed to achieve maximal alignment over the full length of the sequences being compared.

[0104] An amino acid substitution may include but are not limited to the replacement of one amino acid in a polypeptide with another amino acid. Exemplary substitutions are shown in Table A. Amino acid substitutions may be introduced into an antibody of interest and the products screened for a desired activity, e.g., retained/improved antigen binding, decreased immunogenicity, or improved ADCC or CDC.

TABLE A
Exemplary Amino Acid Substitutions.

| Original Residue | Exemplary Substitutions |
|---|---|
| Ala (A) | Val; Leu; Ile |
| Arg (R) | Lys; Gln; Asn |
| Asn (N) | Gln; His; Asp, Lys; Arg |
| Asp (D) | Glu; Asn |
| Cys (C) | Ser; Ala |
| Gln (Q) | Asn; Glu |
| Glu (E) | Asp; Gln |
| Gly (G) | Ala |
| His (H) | Asn; Gln; Lys; Arg |
| Ile (I) | Leu; Val; Met; Ala; Phe; Norleucine |
| Leu (L) | Norleucine; Ile; Val; Met; Ala; Phe |
| Lys (K) | Arg; Gln; Asn |
| Met (M) | Leu; Phe; Ile |
| Phe (F) | Trp; Leu; Val; Ile; Ala; Tyr |
| Pro (P) | Ala |
| Ser (S) | Thr |
| Thr (T) | Val; Ser |
| Trp (W) | Tyr; Phe |
| Tyr (Y) | Trp; Phe; Thr; Ser |
| Val (V) | Ile; Leu; Met; Phe; Ala; Norleucine |

[0105] Amino acids may be grouped according to common side-chain properties:

[0106] (1) hydrophobic: Norleucine, Met, Ala. Val, Leu, Ile:

[0107] (2) neutral hydrophilic: Cys, Ser, Thr, Asn, Gln;

[0108] (3) acidic: Asp, Glu;

[0109] (4) basic: His, Lys, Arg:

[0110] (5) residues that influence chain orientation: Gly, Pro:

[0111] (6) aromatic: Trp, Tyr, Phe.

Non-conservative substitutions will entail exchanging a member of one of these classes for another class.

[0112] The term “vector” is used to describe a polynucleotide that may be engineered to contain a cloned polynucleotide or polynucleotides that may be propagated in a host cell. A vector may include one or more of the following elements: an origin of replication, one or more regulatory sequences (such as, for example, promoters and/or enhancers) that regulate the expression of the polypeptide of interest, and/or one or more selectable marker genes (such as, for example, antibiotic resistance genes and genes that may be used in colorimetric assays. e.g., D-galactosidase). The term “expression vector” refers to a vector that is used to express a polypeptide of interest in a host cell.

[0113] A “host cell” refers to a cell that may be or has been a recipient of a vector or isolated polynucleotide. Host cells may be prokaryotic cells or eukaryotic cells. Exemplary eukaryotic cells include mammalian cells, such as primate or non-primate animal cells: fungal cells, such as yeast; plant cells; and insect cells. Non-limiting exemplary mammalian cells include, but are not limited to, NSO cells, PER.C6® cells (Crucell), and 293 and CHO cells, and their derivatives, such as 293-6E and DG44 cells, respectively. The term “cell” includes the primary subject cell and its progeny.

[0114] The term “isolated” as used herein refers to a molecule that has been separated from at least some of the components with which it is typically found in nature or produced. For example, a polypeptide is referred to as “isolated” when it is separated from at least some of the components of the cell in which it was produced. Where a polypeptide is secreted by a cell after expression, physically separating the supernatant containing the polypeptide from the cell that produced it is considered to be “isolating” the polypeptide. Similarly, a polynucleotide is referred to as “isolated” when it is not part of the larger polynucleotide (such as, for example, genomic DNA or mitochondrial DNA, in the case of a DNA polynucleotide) in which it is typically found in nature, or is separated from at least some of the components of the cell in which it was produced, e.g., in the case of an RNA polynucleotide. Thus, a DNA polynucleotide that is contained in a vector inside a host cell may be referred to as “isolated”.

[0115] The terms “individual” or “subject” are used interchangeably herein to refer to a mammal. In some embodiments, methods of treating mammals, including, but not limited to, humans, rodents, simians, felines, canines, equines, bovines, porcines, ovines, caprines, mammalian laboratory animals, mammalian farm animals, mammalian sport animals, and mammalian pets, are provided. In some examples, an “individual” or “subject” refers to an individual or subject in need of treatment for a disease or disorder.

[0116] As used herein, “treatment” or “treating” is an approach for obtaining beneficial or desired results including clinical results. For purposes of this invention, beneficial or desired clinical results include, but are not limited to, one or more of the following: alleviating one or more symptoms resulting from the disease, diminishing the extent of the disease, stabilizing the disease (e.g., preventing or delaying the worsening of the disease), preventing or delaying the spread (e.g., metastasis) of the disease, preventing or delaying the recurrence of the disease, delay or slowing the progression of the disease, ameliorating the disease state, providing a remission (partial or total) of the disease, decreasing the dose of one or more other medications required to treat the disease, delaying the progression of the disease, increasing the quality of life, and/or prolonging survival. Also encompassed by “treatment” is a reduction of pathological consequence of cancer. The methods of the invention contemplate any one or more of these aspects of treatment.

[0117] The term “prevent,” and similar words such as “prevented,” “preventing” etc., indicate an approach for preventing, inhibiting, or reducing the likelihood of the recurrence of, a disease or condition, e.g., cancer. It also refers to delaying the recurrence of a disease or condition or delaying the recurrence of the symptoms of a disease or condition. As used herein, “prevention” and similar words also includes reducing the intensity, effect, symptoms and/or burden of a disease or condition prior to recurrence of the disease or condition.

[0118] As used herein, “delaying” the development of cancer means to defer, hinder, slow, retard, stabilize, and/or postpone development of the disease. This delay can be of varying lengths of time, depending on the history of the disease and/or individual being treated. A method that “delays” development of cancer is a method that reduces probability of disease development in a given time frame and/or reduces the extent of the disease in a given time frame, when compared to not using the method. Such comparisons are typically based on clinical studies, using a statistically significant number of individuals. Cancer development can be detectable using standard methods, including, but not limited to, computerized axial tomography (CAT Scan), Magnetic Resonance Imaging (MRI), abdominal ultrasound, clotting tests, arteriography, or biopsy. Development may also refer to cancer progression that may be initially undetectable and includes occurrence, recurrence, and onset.

[0119] The term “effective amount” used herein refers to an amount of an agent or a combination of agents, sufficient to treat a specified disorder, condition or disease such as to ameliorate, palliate, lessen, and/or delay one or more of its symptoms. In reference to cancer, an effective amount comprises an amount sufficient to cause a tumor to shrink and/or to decrease the growth rate of the tumor (such as to suppress tumor growth) or to prevent or delay other undesired cell proliferation. In some embodiments, an effective amount is an amount sufficient to delay disease development. In some embodiments, an effective amount is an amount sufficient to prevent or delay recurrence. An effective amount can be administered in one or more administrations. The effective amount of the drug or composition may: (i) reduce the number of cancer cells; (ii) reduce tumor size: (iii) inhibit, retard, slow to some extent and preferably stop cancer cell infiltration into peripheral organs; (iv) inhibit (i.e., slow to some extent and preferably stop) tumor metastasis; (v) inhibit tumor growth; (vi) prevent or delay occurrence and/or recurrence of tumor; and/or (vii) relieve to some extent one or more of the symptoms associated with the cancer.

[0120] It is understood that embodiments of the invention described herein include “consisting” and/or “consisting essentially of” embodiments.

[0121] Reference to “about” a value or parameter herein includes (and describes) variations that are directed to that value or parameter per se. For example, description referring to “about X” includes description of “X”.

[0122] As used herein, reference to “not” a value or parameter generally means and describes “other than” a value or parameter. For example, the method is not used to treat cancer of type X means the method is used to treat cancer of types other than X.

[0123] The term “about X-Y” used herein has the same meaning as “about X to about Y.”

[0124] As used herein and in the appended claims, the singular forms “a”, “an”, and “the” include plural referents unless the context clearly dictates otherwise.

[0125] The term “and/or” as used herein a phrase such as “A and/or B” is intended to include both A and B: A or B: A (alone); and B (alone). Likewise, the term “and/or” as used herein a phrase such as “A, B, and/or C” is intended to encompass each of the following embodiments: A, B, and C; A, B. or C; A or C; A or B; B or C; A and C; A and B: B and C; A (alone); B (alone); and C (alone).

[0126] It is appreciated that certain features of the invention, which are, for clarity, described in the context of separate embodiments, may also be provided in combination in a single embodiment. Conversely, various features of the invention, which are, for brevity, described in the context of a single embodiment, may also be provided separately or in any suitable subcombination. All combinations of the embodiments pertaining to the heterodimeric proteins are specifically embraced by the present invention and are disclosed herein just as if each and every combination was individually and explicitly disclosed. In addition, all subcombinations of the heterodimeric proteins listed in the embodiments describing such variables are also specifically embraced by the present invention and are disclosed herein just as if each and every such sub-combination of the heterodimeric proteins was individually and explicitly disclosed herein.

### II. HETERODIMERIC PROTEINS

[0127] The present application provides heterodimeric proteins comprising CH3 domains having any one or combination of engineered residues, which promote heterodimer formation as described in the subsection “CH3 domain mutations.” Heteromultimers comprising multiple heterodimers formed by a first polypeptide comprising a first engineered CH3 domain and a second polypeptide comprising a second engineered CH3 domain are also contemplated herein.

[0128] In some embodiments, there is provided a heterodimeric protein (e.g., multispecific antibody) comprising a first polypeptide comprising a first CH3 domain and a second polypeptide comprising a second CH3 domain, wherein: i) the first CH3 domain comprises a cysteine (C) residue at position 390 and the second CH3 domain comprises a cysteine residue at position 400, or the first CH3 domain comprises a cysteine residue at position 400 and the second CH3 domain comprises a cysteine residue at position 390; or ii) the first CH3 domain comprises a cysteine residue at position 392 and the second CH3 domain comprises a cysteine residue at position 397, or the first CH3 domain comprises a cysteine residue at position 397 and the second CH3 domain comprises a cysteine residue at position 392; or iii) the first CH3 domain comprises a cysteine residue at position 392 and the second CH3 domain comprises a cysteine residue at position 400, or the first CH3 domain comprises a cysteine residue at position 400 and the second CH3 domain comprises a cysteine residue at position 392; and wherein the amino acid residue numbering is based on EU numbering.

[0129] In some embodiments, there is provided a heterodimeric protein (e.g., multispecific antibody) comprising a first polypeptide comprising a first CH3 domain and a second polypeptide comprising a second CH3 domain, wherein: i) the first CH3 domain further comprises a positively charged residue at position 357 and the second CH3 domain further comprises a negatively charged residue at position 351, or the first CH3 domain further comprises a negatively charged residue at position 351 and the second CH3 domain further comprises a positively charged residue at position 357; or ii) the first CH3 domain further comprises a positively charged residue at position 411 and the second CH3 domain further comprises a negatively charged residue at position 370, or the first CH3 domain further comprises a negatively charged residue at position 370 and the second CH3 domain further comprises a positively charged residue at position 411; or iii) the first CH3 domain further comprises a positively charged residue at position 364 and the second CH3 domain further comprises a negatively charged residue at position 370, or the first CH3 domain further comprises a negatively charged residue at position 370 and the second CH3 domain further comprises a positively charged residue at position 364; or a combination of i) and ii), or a combination or i) and iii), wherein the amino acid residue numbering is based on EU numbering. In some embodiments, the first CH3 domain further comprises a positively charged residue at position 356 and the second CH3 domain further comprises a negatively charged residue at position 439, or first CH3 domain further comprises a negatively charged residue at position 439 and the second CH3 domain further comprises a positively charged residue at position 356, and wherein the amino acid residue numbering is based on EU numbering.

[0130] In some embodiments, there is provided a heterodimeric protein (e.g., multispecific antibody) comprising a first polypeptide comprising a first CH3 domain and a second polypeptide comprising a second CH3 domain, wherein: i) the first CH3 domain comprises a cysteine (C) residue at position 390 and the second CH3 domain comprises a cysteine residue at position 400, or the first CH3 domain comprises a cysteine residue at position 400 and the second CH3 domain comprises a cysteine residue at position 390; or ii) the first CH3 domain comprises a cysteine residue at position 392 and the second CH3 domain comprises a cysteine residue at position 397, or the first CH3 domain comprises a cysteine residue at position 397 and the second CH3 domain comprises a cysteine residue at position 392; or iii) the first CH3 domain comprises a cysteine residue at position 392 and the second CH3 domain comprises a cysteine residue at position 400, or the first CH3 domain comprises a cysteine residue at position 400 and the second CH3 domain comprises a cysteine residue at position 392; and wherein: a) the first CH3 domain further comprises a positively charged residue at position 357 and the second CH3 domain further comprises a negatively charged residue at position 351, or the first CH3 domain further comprises a negatively charged residue at position 351 and the second CH3 domain further comprises a positively charged residue at position 357; or b) the first CH3 domain further comprises a positively charged residue at position 411 and the second CH3 domain further comprises a negatively charged residue at position 370, or the first CH3 domain further comprises a negatively charged residue at position 370 and the second CH3 domain further comprises a positively charged residue at position 411; or c) the first CH3 domain further comprises a positively charged residue at position 364 and the second CH3 domain further comprises a negatively charged residue at position 370, or the first CH3 domain further comprises a negatively charged residue at position 370 and the second CH3 domain further comprises a positively charged residue at position 364; or a combination of a) and b), or a combination of a) and c); wherein the amino acid residue numbering is based on EU numbering. In some embodiments, the first CH3 domain further comprises a positively charged residue at position 356 and the second CH3 domain further comprises a negatively charged residue at position 439, or first CH3 domain further comprises a negatively charged residue at position 439 and the second CH3 domain further comprises a positively charged residue at position 356, and wherein the amino acid residue numbering is based on EU numbering.

[0131] The CH3 domains may be derived from any naturally occurring immunoglobulin molecules. In some embodiments, the CH3 domains are derived from an IgG1 molecule, an IgG2 molecule, an IgG3 molecule, or an IgG4 molecule. In some embodiments, the CH3 domains are human CH3 domains. In some embodiments, the CH3 domains are derived from human IgG1 molecules.

[0132] In some embodiments, there is provided a heterodimeric protein (e.g., multispecific antibody) comprising a first polypeptide comprising a first CH3 domain and a second polypeptide comprising a second CH3 domain, wherein: i) the first CH3 domain comprises N390C substitution and the second CH3 domain comprises S400C substitution, or the first CH3 domain comprises S400C substitution and the second CH3 domain comprises N390C substitution; or ii) the first CH3 domain comprises K392C substitution and the second CH3 domain comprises V397C substitution, or the first CH3 domain comprises V397C substitution and the second CH3 domain comprises K392C substitution; or iii) the first CH3 domain comprises K392C substitution and the second CH3 domain comprises S400C substitution, or the first CH3 domain comprises S400C substitution and the second CH3 domain comprises K392C substitution.

[0133] In some embodiments, there is provided a heterodimeric protein (e.g., multispecific antibody) comprising a first polypeptide comprising a first CH3 domain and a second polypeptide comprising a second CH3 domain, wherein: i) the first CH3 domain comprises E357K and T411K substitutions and the second CH3 domain comprises L351D and K370D substitutions, or the first CH3 domain comprises L351D and K370D substitutions and the second CH3 domain comprises E357K and T411K substitutions; or ii) the first CH3 domain comprises E357K and S364K substitutions and the second CH3 domain comprises L351D and K370D substitutions, or the first CH3 domain comprises L351D and K370D substitutions and the second CH3 domain comprises E357K and S364K substitutions; or iii) the first CH3 domain comprises D356K, E357K and S364K substitutions and the second CH3 domain comprises L351D, K370D and K439D substitutions, or the first CH3 domain comprises L351D, K370D and K439D substitutions and the second CH3 domain comprises D356K, E357K and S364K substitutions.

[0134] In some embodiments, there is provided a heterodimeric protein (e.g., multispecific antibody) comprising a first polypeptide comprising a first CH3 domain and a second polypeptide comprising a second CH3 domain, wherein the first CH3 domain comprises E357K, S364K and N390C substitutions and the second CH3 domain comprises L351D, K370D, and S400C substitutions, or the first CH3 domain comprises L351D, K370D, and S400C substitutions and the second CH3 domain comprises E357K, S364K and N390C substitutions.

[0135] In some embodiments, there is provided a heterodimeric protein (e.g., multispecific antibody) comprising a first polypeptide comprising a first CH3 domain and a second polypeptide comprising a second CH3 domain, wherein the first CH3 domain comprises E357K, S364K and S400C substitutions and the second CH3 domain comprises L351D, K370D, and N390C substitutions, or the first CH3 domain comprises L351D, K370D, and N390C substitutions and the second CH3 domain comprises E357K, S364K and S400C substitutions.

[0136] In some embodiments, there is provided a heterodimeric protein (e.g., multispecific antibody) comprising a first polypeptide comprising a first CH3 domain and a second polypeptide comprising a second CH3 domain, wherein the first CH3 domain comprises D356K, E357K, S364K and S400C substitutions and the second CH3 domain comprises L351D, K370D, N390C and K439D substitutions, or the first CH3 domain comprises L351D, K370D, N390C and K439D substitutions and the second CH3 domain comprises D356K, E357K, S364K and S400C substitutions.

[0137] In some embodiments, there is provided a heterodimeric protein (e.g., multispecific antibody) comprising a first polypeptide comprising a first CH3 domain and a second polypeptide comprising a second CH3 domain, wherein the first CH3 domain comprises D356K, E357K, S364K and N390C substitutions and the second CH3 domain comprises L351D, K370D, K439D and S400C substitutions, or the first CH3 domain comprises L351D, K370D, K439D and S400C substitutions and the second CH3 domain comprises D356K, E357K, S364K and N390C substitutions.

[0138] In some embodiments, the heterodimeric protein comprises an IgG Fc region that comprises the engineered CH3 domains. The Fc region may be derived from any suitable Fc subclasses, including, but not limited to, IgG1, IgG2, IgG3, and IgG4 subclasses.

[0139] Tables 1 A-1B in the Examples section lists exemplary polypeptide sequences (SEQ ID NOs: 1-28) of CH3 domains (or Fc regions) comprising the engineered disulfide bond(s) and/or salt bridge(s) described herein. Other polypeptide sequences of engineered CH3 domains or polypeptides of the Fc regions include SEQ ID NOs: 138-365. Also provided are polypeptides comprising an amino acid sequence selected from the group consisting of SEQ ID NOs: 1-28 and 138-365.

[0140] In some embodiments, there is provided a heterodimeric protein (e.g., multispecific antibody) comprising a first polypeptide comprising the amino acid sequence of SEQ ID NO: 1, and a second polypeptide comprising the amino acid sequence of SEQ ID NO: 2. In some embodiments, there is provided a heterodimeric protein (e.g., multispecific antibody) comprising a first polypeptide comprising the amino acid sequence of SEQ ID NO: 3, and a second polypeptide comprising the amino acid sequence of SEQ ID NO: 4. In some embodiments, there is provided a heterodimeric protein (e.g., multispecific antibody) comprising a first polypeptide comprising the amino acid sequence of SEQ ID NO: 5, and a second polypeptide comprising the amino acid sequence of SEQ ID NO: 6. In some embodiments, there is provided a heterodimeric protein (e.g., multispecific antibody) comprising a first polypeptide comprising the amino acid sequence of SEQ ID NO: 7, and a second polypeptide comprising the amino acid sequence of SEQ ID NO: 8. In some embodiments, there is provided a heterodimeric protein (e.g., multispecific antibody) comprising a first polypeptide comprising the amino acid sequence of SEQ ID NO: 9, and a second polypeptide comprising the amino acid sequence of SEQ ID NO: 10. In some embodiments, there is provided a heterodimeric protein (e.g., multispecific antibody) comprising a first polypeptide comprising the amino acid sequence of SEQ ID NO: 11, and a second polypeptide comprising the amino acid sequence of SEQ ID NO: 12. In some embodiments, there is provided a heterodimeric protein (e.g., multispecific antibody) comprising a first polypeptide comprising the amino acid sequence of SEQ ID NO: 13, and a second polypeptide comprising the amino acid sequence of SEQ ID NO: 14. In some embodiments, there is provided a heterodimeric protein (e.g., multispecific antibody) comprising a first polypeptide comprising the amino acid sequence of SEQ ID NO: 15, and a second polypeptide comprising the amino acid sequence of SEQ ID NO: 16. In some embodiments, there is provided a heterodimeric protein (e.g., multispecific antibody) comprising a first polypeptide comprising the amino acid sequence of SEQ ID NO: 17, and a second polypeptide comprising the amino acid sequence of SEQ ID NO: 18. In some embodiments, there is provided a heterodimeric protein (e.g., multispecific antibody) comprising a first polypeptide comprising the amino acid sequence of SEQ ID NO: 19, and a second polypeptide comprising the amino acid sequence of SEQ ID NO: 20. In some embodiments, there is provided a heterodimeric protein (e.g., multispecific antibody) comprising a first polypeptide comprising the amino acid sequence of SEQ ID NO: 21, and a second polypeptide comprising the amino acid sequence of SEQ ID NO: 22. In some embodiments, there is provided a heterodimeric protein (e.g., multispecific antibody) comprising a first polypeptide comprising the amino acid sequence of SEQ ID NO: 23, and a second polypeptide comprising the amino acid sequence of SEQ ID NO: 24.

### CH3 Domain Mutations

[0141] The heterodimeric proteins described herein may have one or more engineered disulfide bonds, one or more engineered (e.g., rearranged or inversed) salt bridges, or a combination thereof. Unless stated otherwise, all amino acid residue numbering herein is based on EU numbering, and the amino acid substitutions are relative to the wildtype (or naturally occurring) sequence at the corresponding amino acid positions in a wild type (or naturally occurring) CH3 domain sequence. It is appreciated that the mutations or substitutions described herein are applicable to all IgG subclasses and allotypes. IgG allotypes have been described, for example, in Jefferis R and Lefranc M, mAbs 1:4, 1-7 (2009), which is incorporated herein by reference in its entirety. In some embodiments, the amino acid mutations or substitutions described herein are relative to a wildtype CH3 domain sequence of an IgG1, such as IgG1 allotype G1m, 1(a), 2(x), 3(f) or 17(z). In some embodiments, the amino acid mutations or substitutions described herein are relative to a wildtype CH3 domain sequence of an IgG4. For example, a D356K substitution relative to a wildtype CH3 domain of one human IgG1 allotype (Uniprot ID P01857; SEQ ID NO: 29) is equivalent to an E356K substitution relative to a wildtype CH3 domain of a second human IgG1 allotype (SEQ ID NO: 30), or a wildtype CH3 domain of a human IgG4 (SEQ ID NO: 31). Exemplary CH3 domain mutations are shown in Tables 1A-1B. In some embodiments, the amino acid mutations or substitutions described herein are relative to a wildtype Fc region sequence, e.g., an IgG1 Fc region (SEQ ID NO: 32 or 33) or an IgG4 Fc region (SEQ ID NO: 34).

### Novel Cysteine Mutations

[0142] In some embodiments, the heterodimeric proteins described herein comprise a first polypeptide comprising a first CH3 domain and a second polypeptide comprising a second CH3 domain, wherein the first CH3 domain comprises a first engineered cysteine residue and the second CH3 domain comprises a second engineered cysteine residue, wherein the first engineered cysteine residue and the second cysteine residue form a disulfide bond.

[0143] In some embodiments, the first CH3 domain comprises a C at position 390 and the second CH3 domain comprises a C at position 400, or the first CH3 domain comprises a C at position 400 and the second CH3 domain comprises a C at position 390. In some embodiments, the first CH3 domain comprises N390C substitution and the second CH3 domain comprises S400C substitution, or the first CH3 domain comprises S400C substitution and the second CH3 domain comprises N390C substitution.

[0144] In some embodiments, the first CH3 domain comprises a C at position 392 and the second CH3 domain comprises a C at position 397, or the first CH3 domain comprises a C at position 397 and the second CH3 domain comprises a C at position 392. In some embodiments, the first CH3 domain comprises K392C substitution and the second CH3 domain comprises V397C substitution, or the first CH3 domain comprises V397C substitution and the second CH3 domain comprises K392C substitution.

[0145] In some embodiments, the first CH3 domain comprises a C at position 392 and the second CH3 domain comprises a C at position 400, or the first CH3 domain comprises a C at position 400 and the second CH3 domain comprises a C at position 392. In some embodiments, the first CH3 domain comprises K392C substitution and the second CH3 domain comprises S400C substitution, or the first CH3 domain comprises S400C substitution and the second CH3 domain comprises K392C substitution.

### Novel Salt Bridge Mutations

[0146] In some embodiments, the heterodimeric proteins described herein comprise a first polypeptide comprising a first CH3 domain and a second polypeptide comprising a second CH3 domain, wherein the first CH3 domain comprises an engineered positively charged residue and the second CH3 domain comprises an engineered negatively charged residue, wherein the engineered positively charged residue and the engineered negatively charged residue form a salt bridge. The engineered salt bridge may introduce new salt bridges between the CH3 domains, rearrange a salt-bridge network among two or more amino acid residues, or reverse the charges on the amino acid residues forming the salt bridge (i.e., “inverse” a salt bridge) with respect to wildtype CH3 domains. In some embodiments, the engineered positively charged residue substitutes a negatively charged residue in a wildtype CH3 domain with a positively charged residue. In some embodiments, the engineered negatively charged residue substitutes a positively charged residue in a wildtype CH3 domain with a negatively charged residue. The rearranged and inversed salt bridges may result in changes in the isoelectric points (PI) of the heterodimer and the homodimer comprising the engineered CH3 domains, thereby allowing better separation of the heterodimer from the homodimer in a purification process.

[0147] In some embodiments, the first CH3 domain comprises a positively charged residue at position 357 and the second CH3 domain comprises a negatively charged residue at position 351, or the first CH3 domain comprises a negatively charged residue at position 351 and the second CH3 domain comprises a positively charged residue at position 357. In some embodiments, first CH3 domain comprises a K at position 357 and the second CH3 domain comprises a D at position 351, or the first CH3 domain comprises a D at position 351 and the second CH3 domain comprises a K at position 357. In some embodiments, first CH3 domain comprises a K at position 357 and the second CH3 domain comprises an E at position 351, or the first CH3 domain comprises an E at position 351 and the second CH3 domain comprises a K at position 357. In some embodiments, first CH3 domain comprises an R at position 357 and the second CH3 domain comprises a D at position 351, or the first CH3 domain comprises a D at position 351 and the second CH3 domain comprises an R at position 357. In some embodiments, first CH3 domain comprises an R at position 357 and the second CH3 domain comprises an E at position 351, or the first CH3 domain comprises an E at position 351 and the second CH3 domain comprises an R at position 357. In some embodiments, the first CH3 domain comprises E357K substitution and the second CH3 domain comprises L351D substitution, or the first CH3 domain comprises L351D substitution and the second CH3 domain comprises E357K substitution.

[0148] In some embodiments, the first CH3 domain comprises a positively charged residue at position 411 and the second CH3 domain comprises a negatively charged residue at position 370, or the first CH3 domain comprises a negatively charged residue at position 370 and the second CH3 domain comprises a positively charged residue at position 411. In some embodiments, first CH3 domain comprises a K at position 411 and the second CH3 domain comprises a D at position 370, or the first CH3 domain comprises a D at position 370 and the second CH3 domain comprises a K at position 411. In some embodiments, first CH3 domain comprises a K at position 411 and the second CH3 domain comprises an E at position 370, or the first CH3 domain comprises an E at position 370 and the second CH3 domain comprises a K at position 411. In some embodiments, first CH3 domain comprises an R at position 411 and the second CH3 domain comprises a D at position 370, or the first CH3 domain comprises a D at position 370 and the second CH3 domain comprises an R at position 411. In some embodiments, first CH3 domain comprises an R at position 411 and the second CH3 domain comprises an E at position 370, or the first CH3 domain comprises an E at position 370 and the second CH3 domain comprises an R at position 411. In some embodiments, the first CH3 domain comprises T411K substitution and the second CH3 domain comprises K370D substitution, or the first CH3 domain comprises K370D substitution and the second CH3 domain comprises T411K substitution.

[0149] In some embodiments, the first CH3 domain comprises a positively charged residue at position 364 and the second CH3 domain comprises a negatively charged residue at position 370, or the first CH3 domain comprises a negatively charged residue at position 370 and the second CH3 domain comprises a positively charged residue at position 364. In some embodiments, first CH3 domain comprises a K at position 364 and the second CH3 domain comprises a D at position 370, or the first CH3 domain comprises a D at position 370 and the second CH3 domain comprises a K at position 364. In some embodiments, first CH3 domain comprises a K at position 364 and the second CH3 domain comprises an E at position 370, or the first CH3 domain comprises an E at position 370 and the second CH3 domain comprises a K at position 364. In some embodiments, first CH3 domain comprises an R at position 364 and the second CH3 domain comprises a D at position 370, or the first CH3 domain comprises a D at position 370 and the second CH3 domain comprises an R at position 364. In some embodiments, first CH3 domain comprises an R at position 364 and the second CH3 domain comprises an E at position 370, or the first CH3 domain comprises an E at position 370 and the second CH3 domain comprises an R at position 364. In some embodiments, the first CH3 domain comprises S364K substitution and the second CH3 domain comprises K370D substitution, or the first CH3 domain comprises K370D substitution and the second CH3 domain comprises S364K substitution.

[0150] In some embodiments, the first CH3 domain comprises a positively charged residue at position 356 and the second CH3 domain comprises a negatively charged residue at position 439, or the first CH3 domain comprises a negatively charged residue at position 439 and the second CH3 domain comprises a positively charged residue at position 356. In some embodiments, first CH3 domain comprises a K at position 356 and the second CH3 domain comprises a D at position 439, or the first CH3 domain comprises a D at position 439 and the second CH3 domain comprises a K at position 356. In some embodiments, first CH3 domain comprises a K at position 356 and the second CH3 domain comprises an E at position 439, or the first CH3 domain comprises an E at position 439 and the second CH3 domain comprises a K at position 356. In some embodiments, first CH3 domain comprises an R at position 356 and the second CH3 domain comprises a D at position 439, or the first CH3 domain comprises a D at position 439 and the second CH3 domain comprises an R at position 356. In some embodiments, first CH3 domain comprises an R at position 356 and the second CH3 domain comprises an E at position 439, or the first CH3 domain comprises an E at position 439 and the second CH3 domain comprises an R at position 356. In some embodiments, the first CH3 domain comprises D356K substitution and the second CH3 domain comprises K439D substitution, or the first CH3 domain comprises K439D substitution and the second CH3 domain comprises D356K substitution.

[0151] Any of the engineered salt bridges described herein may be combined with each other. In some embodiments, the first CH3 domain comprises a positively charged residue at position 357 and a positively charged residue at position 411 and the second CH3 domain comprises a negatively charged residue at position 351 and a negatively charged residue at position 370, or the first CH3 domain comprises a negatively charged residue at position 351 and a negatively charged residue at position 370 and the second CH3 domain comprises a positively charged residue at position 357 and a positively charged residue at position 411. In some embodiments, the first CH3 domain comprises E357K and T411K substitutions and the second CH3 domain comprises L351D and K370D substitutions, or the first CH3 domain comprises L351D and K370D substitutions and the second CH3 domain comprises E357K and T411K substitutions.

[0152] In some embodiments, the first CH3 domain comprises a positively charged residue at position 357 and a positively charged residue at position 364 and the second CH3 domain comprises a negatively charged residue at position 351 and a negatively charged residue at position 370, or the first CH3 domain comprises a negatively charged residue at position 351 and a negatively charged residue at position 370 and the second CH3 domain comprises a positively charged residue at position 357 and a positively charged residue at position 364. In some embodiments, the first CH3 domain comprises E357K and S364K substitutions and the second CH3 domain comprises L351D and K370D substitutions, or the first CH3 domain comprises L351D and K370D substitutions and the second CH3 domain comprises E357K and S364K substitutions.

[0153] In some embodiments, the first CH3 domain comprises a positively charged residue at position 356, a positively charged residue at position 357, and a positively charged residue at position 364 and the second CH3 domain comprises a negatively charged residue at position 351, a negatively charged residue at position 370, and a negatively charged residue at position 439, or the first CH3 domain comprises a negatively charged residue at position 351, a negatively charged residue at position 370, and a negatively charged residue at position 439 and the second CH3 domain comprises a positively charged residue at position 356, a positively charged residue at position 357, and a positively charged residue at position 364. In some embodiments, the first CH3 domain comprises D356K, E357K and S364K substitutions and the second CH3 domain comprises L351D, K370D and K439D substitutions, or the first CH3 domain comprises L351D, K370D and K439D substitutions and the second CH3 domain comprises D356K, E357K and S364K substitutions.

### Other Mutations

[0154] The CH3 domains or the Fc regions described herein may further comprise engineered disulfide bonds and/or salt bridges listed in Table B below.

TABLE B
Exemplary Fc mutations.

| Mutation(s) in first polypeptide chain | Mutation(s) in second polypeptide chain |
|---|---|
| F405L | K409R |
| S364H, F405A | Y349T, T394F |
| S364K, E357Q | L368D, K370S |
| T366W | T366S, L368A, Y407V |
| S354C, T366W | Y349C, T366S, L368A, Y407V |
| T350, L351, F405, Y407 | T350, T366, K392, T394 |
| T350 is T350V, T350I, T350L or T350M | T350 is T350V, T350I, T350L or T350M |
| L351 is L351Y | T366 is T366L, T366I, T366V or T366M |
| F450 is F450A, F450V, F450T or F450S | K392 is K392F, K392L or K392M |
| Y407 is Y407V, Y407A or Y407I | T394 is T394W |
| D399K, E356K | K409D, K392D |
| D221E, P228E, L368E | D221R, P228R, K409R |
| C223E, E225E, P228E, L368E | C223R, E225R, P228R, K409R |
| H435R | None |
| K196Q, S228P, F296Y, E356K, R409K, H435R, L445P | K196Q, S228P, F296Y, R409K, K439E, L445P |
| K409W | D399V/F405T |
| K360E | Q347R |
| Y349C/K360E/K409W | Q347R/S354C/D399V/F405T |
| K360E/K409W | Q347R/D399V/F405T |
| Y349S/K409W | E357W/D399V/F405T |
| Y349S/S354C/K409W | Y349C/E357W/D399V/F405T |
| T366K | L351D |
| Y349E or D and L368E | L351D |
| Y349C/T366W | D356C/T366S/L368A/Y407V/F405K |
| Y349C/T366W/F405K | D356C/T366S/L368A/Y407V |
| Y349C/T366W/K409E | D356C/T366S/L368A/Y407V/F405K |
| Y349C/T366W/K409A | D356C/T366S/L368A/Y407V/F405K |
| S364K | L368D |
| S364K | K370S |
| F405K | K409F |
| F405R | K409F |
| S364K/K409F | L368D/F405R |
| S364K/K409F | K370S/F405R |
| S364K/K409W | K370S/F405R |
| K370E or E356K and K409R | E357K and K409R or K370E |
| 354/364/407 | 347/349/350/351/366/368/370/407 |
| 349 | 351/354/357/360/364/366/368/407 |
| P395K/P396K/V397K | T394D/P395D/P396D |
| F405E/Y407E/K409E | F405K/Y407K |
| M428S/N434S/Y436H | H435R |

[0155] In some embodiments, the first CH3 domain further comprises a C at position 392 and the second CH3 domain comprises a C at position 399, or the first CH3 domain comprises a C at position 399 and the second CH3 domain comprises a C at position 392. In some embodiments, the first CH3 domain further comprises K392C substitution and the second CH3 domain further comprises D399C substitution, or the first CH3 domain further comprises D399C substitution and the second CH3 domain further comprises K392C substitution.

[0156] In some embodiments, the first CH3 domain further comprises a C at position 394 and the second CH3 domain comprises a C at position 354, or the first CH3 domain comprises a C at position 354 and the second CH3 domain comprises a C at position 394. In some embodiments, the first CH3 domain further comprises Y394C substitution and the second CH3 domain further comprises S354C substitution, or the first CH3 domain further comprises S354C substitution and the second CH3 domain further comprises Y394C substitution.

[0157] In some embodiments, the first CH3 domain further comprises a C at position 356 and the second CH3 domain comprises a C at position 349, or the first CH3 domain comprises a C at position 349 and the second CH3 domain comprises a C at position 356. In some embodiments, the first CH3 domain further comprises D356C substitution and the second CH3 domain further comprises Y349C substitution, or the first CH3 domain further comprises Y349C substitution and the second CH3 domain further comprises D356C substitution.

[0158] In some embodiments, the first CH3 domain further comprises K392D and K409D substitutions and the second CH3 domain further comprises D356K and D399K substitutions, or the first CH3 domain further comprises D356K and D399K substitutions and the second CH3 domain further comprises K392D and K409D substitutions.

[0159] In some embodiments, the first CH3 domain further comprises L368D and K370S substitutions and the second CH3 domain further comprises E357Q and S364K substitutions, or the first CH3 domain further comprises E357Q and S364K substitutions and the second CH3 domain further comprises L368D and K370S substitutions.

[0160] In some embodiments, the first CH3 domain further comprises L351K and T366K substitutions and the second CH3 domain further comprises L351D and L368E substitutions, or the first CH3 domain further comprises L351D and L368E substitutions and the second CH3 domain further comprises L351K and T366K substitutions.

[0161] In some embodiments, the first CH3 domain further comprises P395K, P396K and V397K substitutions and the second CH3 domain comprises T394D, P395D and P396D substitutions, or the first CH3 domain further comprises T394D, P395D and P396D substitutions and the second CH3 domain further comprises P395K, P396K and V397K substitutions.

[0162] In some embodiments, the first CH3 domain further comprises F405E, Y407E and K409E substitutions and the second CH3 domain comprises F405K and Y407K substitutions, or the first CH3 domain further comprises F405K and Y407K substitutions and the second CH3 domain further comprises F405E, Y407E and K409E substitutions.

[0163] The heterodimeric proteins comprising engineered CH3 domains disulfide bonds and/or salt bridges described herein may further comprise one or more knob-into-hole residues. “Knob-into-hole” or “KIH” refers to an approach known in the art for making bispecific antibodies also known as the “protuberance-into-cavity” approach (see, e.g., U.S. Pat. No. 5,731,168). In this approach, two immunoglobulin polypeptides (e.g., heavy chain polypeptides) each comprise an interface. An interface of one immunoglobulin polypeptide interacts with a corresponding interface on the other immunoglobulin polypeptide, thereby allowing the two immunoglobulin polypeptides to associate. These interfaces may be engineered such that a “knob” or “protuberance” (these terms may be used interchangeably herein) located in the interface of one immunoglobulin polypeptide corresponds with a “hole” or “cavity” (these terms may be used interchangeably herein) located in the interface of the other immunoglobulin polypeptide. In some embodiments, the hole is of identical or similar size to the knob and suitably positioned such that when the two interfaces interact, the knob of one interface is positionable in the corresponding hole of the other interface. Without wishing to be bound to theory, this is thought to stabilize the heteromultimer and favor formation of the heteromultimer over other species, for example homomultimers. In some embodiments, the KIH approach is used in combination with the engineered disulfide bonds and/or salt bridges described herein to promote the heteromultimerization of two different immunoglobulin polypeptides, creating a bispecific antibody comprising two immunoglobulin polypeptides with binding specificities for different epitopes. In some embodiments, the CH3 domains of the heterodimeric protein described herein do not comprise KIH residues.

[0164] In some embodiments, the first CH3 domain further comprises T336S, L368A and Y407V substitutions and the second CH3 domain further comprises T366W substitution, or the first CH3 domain further comprises T366W substitution and the second CH3 domain further comprises T336S, L368A and Y407V substitutions.

[0165] In some embodiments, the first CH3 domain comprises L368V and Y407V substitutions and the second CH3 domain comprises T366W substitution, or the first CH3 domain comprises T366W substitution and the second CH3 domain comprises L368V and Y407V substitutions.

### III. MULTISPECIFIC ANTIBODIES

[0166] In some embodiments, the heterodimeric protein described herein is a multispecific antibody, such as a bispecific antibody or a trispecific antibody.

[0167] In some embodiments, there is provided a multispecific antibody comprising a first polypeptide comprising a first CH3 domain and a first target binding moiety (TBM), a second polypeptide comprising a second CH3 domain and a second TBM, wherein the first CH3 domain and the second CH3 domain comprise any one or combination of the engineered disulfide bonds or salt bridges described herein, wherein the first TBM specifically binds to a first target, and wherein the second TBM specifically binds to a second target that is different from the first target. In some embodiments, the TBM is an antigen-binding domain. In some embodiments, the TBM is a scFv or a VHH. In some embodiments, the first CH3 domain comprises N390C substitution and the second CH3 domain comprises S400C substitution, or the first CH3 domain comprises S400C substitution and the second CH3 domain comprises N390C substitution. In some embodiments, the first CH3 domain comprises E357K, S364K and S400C substitutions and the second CH3 domain comprises L351D, K370D, and N390C substitutions, or the first CH3 domain comprises L351D, K370D, and N390C substitutions and the second CH3 domain comprises E357K, S364K and S400C substitutions. In some embodiments, the first CH3 domain comprises D356K, E357K, S364K and N390C substitutions and the second CH3 domain comprises L351D, K370D, K439D and S400C substitutions, or the first CH3 domain comprises L351D, K370D, K439D and S400C substitutions and the second CH3 domain comprises D356K, E357K, S364K and N390C substitutions. In some embodiments, the first CH3 domain comprises D356K, E357K, S364K and S400C substitutions and the second CH3 domain comprises L351D, K370D, N390C and K439D substitutions, or the first CH3 domain comprises L351D, K370D, N390C and K439D substitutions and the second CH3 domain comprises D356K, E357K, S364K and S400C substitutions. In some embodiments, the multispecific antibody comprises an IgG1 Fc region, such as an IgG1 Fc having an N297A substitution. In some embodiments, the multispecific antibody comprises an IgG4 Fc region, such as an IgG4 having a S228P substitution.

[0168] In some embodiments, there is provided a multispecific antibody comprising a first CH3 domain, a second polypeptide comprising a second CH3 domain, a third polypeptide, and a fourth polypeptide, wherein the first CH3 domain and the second CH3 domain comprise any one or combination of the engineered disulfide bonds or salt bridges described herein, wherein the first polypeptide is a first antibody heavy chain, the second polypeptide is a second antibody heavy chain, the third polypeptide is a first antibody light chain, and the fourth polypeptide is a second antibody light chain, wherein the first polypeptide and the third polypeptide associate to form a first antigen binding site that specifically binds a first target, and the second polypeptide and the fourth polypeptide associate to form a second antigen binding site that specifically binds a second target that is different from the first target. In some embodiments, the first CH3 domain comprises N390C substitution and the second CH3 domain comprises S400C substitution, or the first CH3 domain comprises S400C substitution and the second CH3 domain comprises N390C substitution. In some embodiments, the first CH3 domain comprises E357K, S364K and S400C substitutions and the second CH3 domain comprises L351D, K370D, and N390C substitutions, or the first CH3 domain comprises L351D, K370D, and N390C substitutions and the second CH3 domain comprises E357K, S364K and S400C substitutions. In some embodiments, the first CH3 domain comprises D356K, E357K, S364K and N390C substitutions and the second CH3 domain comprises L351D, K370D, K439D and S400C substitutions, or the first CH3 domain comprises L351D. K370D, K439D and S400C substitutions and the second CH3 domain comprises D356K, E357K, S364K and N390C substitutions. In some embodiments, the first CH3 domain comprises D356K, E357K, S364K and S400C substitutions and the second CH3 domain comprises L351D, K370D, N390C and K439D substitutions, or the first CH3 domain comprises L351D, K370D, N390C and K439D substitutions and the second CH3 domain comprises D356K, E357K, S364K and S400C substitutions. In some embodiments, the multispecific antibody comprises an IgG1 Fc region, such as an IgG1 Fc having an N297A substitution. In some embodiments, the multispecific antibody comprises an IgG4 Fc region, such as an IgG4 having a S228P substitution.

[0169] In some embodiments, there is provided a multispecific antibody comprising a first polypeptide comprising a first CH3 domain, a second polypeptide comprising a second CH3 domain, a third polypeptide, and a fourth polypeptide, wherein the first CH3 domain and the second CH3 domain comprise any one or combination of the engineered disulfide bonds or salt bridges described herein, wherein:

[0170] (i) the first polypeptide comprises a structure represented by the formula:

VH1-CH1-hinge-CH2-first CH3;

[0171] (ii) the second polypeptide comprises a structure represented by the formula:

VH2-CH1-hinge-CH2-second CH3;

[0172] (iii) the third polypeptide comprises a structure represented by the formula:

VL1-CL; and

[0173] (iv) the fourth polypeptide comprises a structure represented by the formula:

VL2-CL;

wherein:

[0174] VL1 is a first immunoglobulin light chain variable domain;

[0175] VH1 is a first immunoglobulin heavy chain variable domain;

[0176] VL2 is a second immunoglobulin light chain variable domain;

[0177] VH2 is a second immunoglobulin heavy chain variable domain;

[0178] CL is an immunoglobulin light chain constant domain;

[0179] CH1 is an immunoglobulin heavy chain constant domain 1;

[0180] CH2 is an immunoglobulin heavy chain constant domain 2:
[0181] hinge is an immunoglobulin hinge region connecting the CH1 and CH2 domains;
   wherein VL1 and VH1 associate to form a first Fv that specifically binds to a first target; and wherein VL2 and VH2 associate to form a second Fv that specifically binds to a second target. In some embodiments, VL1 is identical to VL2 (e.g., the multispecific antibody is a common light chain antibody). In some embodiments, VL1 is different from VL2. In some embodiments, the first CH3 domain comprises N390C substitution and the second CH3 domain comprises S400C substitution, or the first CH3 domain comprises S400C substitution and the second CH3 domain comprises N390C substitution. In some embodiments, the first CH3 domain comprises E357K, S364K and S400C substitutions and the second CH3 domain comprises L351D, K370D, and N390C substitutions, or the first CH3 domain comprises L351D, K370D, and N390C substitutions and the second CH3 domain comprises E357K, S364K and S400C substitutions. In some embodiments, the first CH3 domain comprises D356K, E357K, S364K and N390C substitutions and the second CH3 domain comprises L351D, K370D, K439D and S400C substitutions, or the first CH3 domain comprises L351D, K370D, K439D and S400C substitutions and the second CH3 domain comprises D356K, E357K, S364K and N390C substitutions. In some embodiments, the first CH3 domain comprises D356K, E357K, S364K and S400C substitutions and the second CH3 domain comprises L351D, K370D, N390C and K439D substitutions, or the first CH3 domain comprises L351D, K370D, N390C and K439D substitutions and the second CH3 domain comprises D356K, E357K, S364K and S400C substitutions. In some embodiments, the multispecific antibody comprises an IgG1 Fc region, such as an IgG1 Fc having an N297A substitution. In some embodiments, the multispecific antibody comprises an IgG4 Fc region, such as an IgG4 having a S228P substitution. In some embodiments, the first target is PDL1 and the second target is CD137, or the first target is CD137 and the second target is PDL1.

[0182] In some embodiments, there is provided a multispecific antibody comprising a first polypeptide comprising a first CH3 domain, a second polypeptide comprising a second CH3 domain, a third polypeptide, and a fourth polypeptide, wherein the first CH3 domain and the second CH3 domain comprise any one or combination of the engineered disulfide bonds or salt bridges described herein, wherein:

[0183] (i) the first polypeptide comprises a structure represented by the formula:

VH1-CH1-hinge-CH2-first CH3-L1-scFv1;

[0184] (ii) the second polypeptide comprises a structure represented by the formula:

VH2-CH1-hinge-CH2-second CH3-L2-scFv2;

[0185] (iii) the third polypeptide comprises a structure represented by the formula:

VL1-CL; and

[0186] (iv) the fourth polypeptide comprises a structure represented by the formula:

VL2-CL;

wherein:

[0187] VL1 is a first immunoglobulin light chain variable domain;

[0188] VH1 is a first immunoglobulin heavy chain variable domain;

[0189] VL2 is a second immunoglobulin light chain variable domain;

[0190] VH2 is a second immunoglobulin heavy chain variable domain;

[0191] scFv1 is a first single-chain variable fragment;

[0192] scFv2 is a second single-chain variable fragment;

[0193] CL is an immunoglobulin light chain constant domain;

[0194] CH1 is an immunoglobulin heavy chain constant domain 1;

[0195] CH2 is an immunoglobulin heavy chain constant domain 2:
[0196] hinge is an immunoglobulin hinge region connecting the CH1 and CH2 domains; and L1 and L2 is each independently a bond or a peptide linker;
   wherein VL I and VH1 associate to form a first Fv that specifically binds to a first target; wherein VL2 and VH2 associate to form a second Fv that specifically binds to a second target; wherein scFv1 specifically binds to a third target; and wherein scFv2 specifically binds to a fourth target. In some embodiments, the heterodimeric protein is a bispecific antibody, wherein the first target and the second target are the same, and the third target and the fourth target are the same. In some embodiments, the heterodimeric protein is a trispecific antibody, wherein the third target and the fourth target are the same or the first target and the second target are the same. In some embodiments, the heterodimeric protein is a tetraspecific antibody. In some embodiments, VL1 is identical to VL2 (e.g., the multispecific antibody is a common light chain antibody). In some embodiments, VL1 is different from VL2. In some embodiments, the first CH3 domain comprises N390C substitution and the second CH3 domain comprises S400C substitution, or the first CH3 domain comprises S400C substitution and the second CH3 domain comprises N390C substitution. In some embodiments, the first CH3 domain comprises E357K, S364K and S400C substitutions and the second CH3 domain comprises L351D, K370D, and N390C substitutions, or the first CH3 domain comprises L351D, K370D, and N390C substitutions and the second CH3 domain comprises E357K, S364K and S400C substitutions. In some embodiments, the first CH3 domain comprises D356K, E357K, S364K and N390C substitutions and the second CH3 domain comprises L351D, K370D, K439D and S400C substitutions, or the first CH3 domain comprises L351D, K370D, K439D and S400C substitutions and the second CH3 domain comprises D356K, E357K, S364K and N390C substitutions. In some embodiments, the first CH3 domain comprises D356K, E357K, S364K and S400C substitutions and the second CH3 domain comprises L351D, K370D. N390C and K439D substitutions, or the first CH3 domain comprises L351D, K370D, N390C and K439D substitutions and the second CH3 domain comprises D356K, E357K, S364K and S400C substitutions. In some embodiments, the multispecific antibody comprises an IgG1 Fc region, such as an IgG1 Fc having an N297A substitution. In some embodiments, the multispecific antibody comprises an IgG4 Fc region, such as an IgG4 having a S228P substitution.

[0197] In some embodiments, there is provided a multispecific antibody comprising a first polypeptide comprising a first CH3 domain, a second polypeptide comprising a second CH3 domain and a first target binding moiety (TBM) that specifically binds a first target, and a third polypeptide, wherein the first CH3 domain and the second CH3 domain comprise any one or combination of the engineered disulfide bonds or salt bridges described herein, wherein the first polypeptide and the third polypeptide associate to form a second antigen binding site that specifically binds a second target. In some embodiments, the first target binding moiety (TBM) is a scFv or a VHH. In some embodiments, the first CH3 domain comprises N390C substitution and the second CH3 domain comprises S400C substitution, or the first CH3 domain comprises S400C substitution and the second CH3 domain comprises N390C substitution. In some embodiments, the first CH3 domain comprises E357K, S364K and S400C substitutions and the second CH3 domain comprises L351D, K370D, and N390C substitutions, or the first CH3 domain comprises L351D, K370D, and N390C substitutions and the second CH3 domain comprises E357K, S364K and S400C substitutions. In some embodiments, the first CH3 domain comprises D356K, E357K, S364K and N390C substitutions and the second CH3 domain comprises L351D, K370D, K439D and S400C substitutions, or the first CH3 domain comprises L351D, K370D, K439D and S400C substitutions and the second CH3 domain comprises D356K, E357K, S364K and N390C substitutions. In some embodiments, the first CH3 domain comprises D356K, E357K, S364K and S400C substitutions and the second CH3 domain comprises L351D, K370D, N390C and K439D substitutions, or the first CH3 domain comprises L351D, K370D, N390C and K439D substitutions and the second CH3 domain comprises D356K, E357K, S364K and S400C substitutions. In some embodiments, the multispecific antibody comprises an IgG1 Fc region, such as an IgG1 Fc having an N297A substitution. In some embodiments, the multispecific antibody comprises an IgG4 Fc region, such as an IgG4 having a S228P substitution. In some embodiments, the first target is PDL1 and the second target is CD137. In some embodiments, the first target is CD137 and the second target is PDL1. In some embodiments, the first target is CD137 and the second target is CTLA4. In some embodiments, the first target is CTLA4 and the second target is PDL1.

[0198] In some embodiments, there is provided a multispecific antibody comprising a first polypeptide comprising a first CH3 domain, a second polypeptide, and a third polypeptide, wherein the first CH3 domain and the second CH3 domain comprise any one or combination of the engineered disulfide bonds or salt bridges described herein, wherein:

[0199] (i) the first polypeptide comprises a structure represented by the formula:

VH-CH1-hinge-CH2-first CH3;

[0200] (ii) the second polypeptide comprises a structure represented by the formula:

scFv-hinge-CH2-second CH3; and

[0201] (iii) the third polypeptide comprises a structure represented by the formula

VL-CL;

wherein:

[0202] VL is an immunoglobulin light chain variable domain;

[0203] VH is an immunoglobulin heavy chain variable domain;

[0204] scFv is a single-chain variable fragment;

[0205] CL is an immunoglobulin light chain constant domain;

[0206] CH1 is an immunoglobulin heavy chain constant domain 1;

[0207] CH2 is an immunoglobulin heavy chain constant domain 2; and

[0208] hinge is an immunoglobulin hinge region connecting the CH1 and CH2 domains:

wherein VL and VH associate to form an Fv that specifically binds to a first target; and wherein the scFv specifically binds to a second target. In some embodiments, the first CH3 domain comprises N390C substitution and the second CH3 domain comprises S400C substitution, or the first CH3 domain comprises S400C substitution and the second CH3 domain comprises N390C substitution. In some embodiments, the first CH3 domain comprises E357K, S364K and S400C substitutions and the second CH3 domain comprises L351D, K370D, and N390C substitutions, or the first CH3 domain comprises L351D, K370D, and N390C substitutions and the second CH3 domain comprises E357K, S364K and S400C substitutions. In some embodiments, the first CH3 domain comprises D356K, E357K, S364K and N390C substitutions and the second CH3 domain comprises L351D, K370D, K439D and S400C substitutions, or the first CH3 domain comprises L351D, K370D, K439D and S400C substitutions and the second CH3 domain comprises D356K, E357K, S364K and N390C substitutions. In some embodiments, the first CH3 domain comprises D356K, E357K, S364K and S400C substitutions and the second CH3 domain comprises L351D, K370D, N390C and K439D substitutions, or the first CH3 domain comprises L351D, K370D. N390C and K439D substitutions and the second CH3 domain comprises D356K, E357K, S364K and S400C substitutions. In some embodiments, the multispecific antibody comprises an IgG1 Fc region, such as an IgG1 Fc having an N297A substitution. In some embodiments, the multispecific antibody comprises an IgG4 Fc region, such as an IgG4 having a S228P substitution. In some embodiments, the scFv is linked to the hinge in the second polypeptide via a linker, such as a peptide linker comprising the amino acid sequence of SEQ ID NO: 80 or 81. In some embodiments, the first target is CD3 and the second target is a tumor antigen (e.g., HER2). In some embodiments, the first target is a tumor antigen (e.g., HER2) and the second target is CD3.

[0209] In some embodiments, the multispecific antibody comprises one or more antibody constant regions. In some embodiments, the human heavy chain constant region is of an isotype selected from IgA, IgG, and IgD. In some embodiments, the human light chain constant region is of an isotype selected from κ and λ. In some embodiments, the multispecific antibody comprises a human IgG constant region. In some embodiments, the multispecific antibody comprises a human IgG4 heavy chain constant region. In some embodiments, the multispecific antibody comprises a human IgG1 heavy chain constant region. In some such embodiments, the multispecific antibody comprises an S228P mutation in the human IgG4 constant region. In some embodiments, the first polypeptide and the second polypeptide further comprises S228P substitution.

[0210] Whether or not effector function is desirable may depend on the particular method of treatment intended for a multispecific antibody. In some embodiments, when effector function is desirable, a multispecific antibody comprising a human IgG1 heavy chain constant region or a human IgG3 heavy chain constant region is selected. In some embodiments, when effector function is not desirable, a multispecific antibody comprising a human IgG4 or IgG2 heavy chain constant region is selected. In some embodiments, the multispecific antibody comprises a human IgG1 heavy chain constant region comprising one or more mutations that reduces effector function. In some embodiments, the multispecific antibody comprises an IgG1 heavy chain constant region comprising an N297A substitution. In some embodiments, the first polypeptide and the second polypeptide further comprises N297A substitution.

[0211] Any of the multispecific antibodies described herein can specifically bind at least two different targets, or epitopes. The at least two different epitopes recognized can be located on the same antigen, or on different antigens. In some embodiments, the antigens are cell surface molecules. In some embodiments, the antigens are extracellular molecules.

[0212] In some embodiments, the first target, second target, third target and/or fourth target is a cell surface antigen. In some embodiments, the cell surface antigen is an antigen on immune effector cells, such as T cells (e.g., helper T cells, cytotoxic T cells, memory T cells, etc.), B cells, macrophages, and Natural Killer (NK) cells. In some embodiments, the cell surface antigen is a T cell surface antigen, such as CD3.

[0213] In some embodiments, the cell surface antigen is a tumor antigen. Tumor antigens are proteins that are produced by tumor cells that can elicit an immune response, particularly T-cell mediated immune responses. In some embodiments, the tumor antigen is a tumor-specific antigen (TSA) or a tumor-associated antigen (TAA). A TSA is unique to tumor cells and does not occur on other cells in the body. A TAA associated antigen is not unique to a tumor cell, and instead is also expressed on a normal cell under conditions that fail to induce a state of immunologic tolerance to the antigen. The expression of the antigen on the tumor may occur under conditions that enable the immune system to respond to the antigen. TAAs may be antigens that are expressed on normal cells during fetal development, when the immune system is immature, and unable to respond or they may be antigens that are normally present at extremely low levels on normal cells, but which are expressed at much higher levels on tumor cells.

[0214] Non-limiting examples of TSA or TAA antigens include the following: Differentiation antigens such as MART-1/MelanA (MART-I), gp 100 (Pmel 17), tyrosinase, TRP-1, TRP-2 and tumor-specific multilineage antigens such as MAGE-1, MAGE-3, BAGE, GAGE-1, GAGE-2, pl5; overexpressed embryonic antigens such as CEA; overexpressed oncogenes and mutated tumor-suppressor genes such as p53, Ras, HER2/neu; unique tumor antigens resulting from chromosomal translocations; such as BCR-ABL, E2A-PRL, H4-RET, IGH-IGK, MYL-RAR; and viral antigens, such as the Epstein Barr virus antigens EBVA and the human papillomavirus (HPV) antigens E6 and E7. Other large, protein-based antigens include TSP-180, MAGE-4, MAGE-5, MAGE-6, RAGE, NY-ESO, pl85erbB2, pl80erbB-3, c-met, nm-23HI, PSA, TAG-72, CA 19-9, CA 72-4, CAM 17.1, NuMa, K-ras, beta-Catenin, CDK4, Mum-1, p 15, p 16, 43-9F, 5T4, 791Tgp72, alpha-fetoprotein, beta-HCG, BCA225, BTAA, CA 125, CA 15-3\CA 27.29\BCAA, CA 195, CA 242, CA-50, CAM43, CD68\P1, CO-029, FGF-5, G250, Ga733\EpCAM, HTgp-175, M344, MA-50, MG7-Ag, MOV18, NB/70K, NY-CO-1, RCAS 1, SDCCAG16, TA-90\Mac-2 binding protein\cyclophilin C-associated protein, TAAL6, TAG72, TLP, and TPS.

[0215] In some embodiments, the first, second, third and/or fourth target is an immune checkpoint molecule. In some embodiments, the immune checkpoint molecule is a stimulatory immune checkpoint molecule. Exemplary stimulatory immune checkpoint molecules include, but are not limited to, CD28, OX40, ICOS, GITR, 4-1BB, CD27, CD40, CD3, HVEM, and TCR (e.g., MHC class I or class 11 molecules). In some embodiments, the immune checkpoint molecule is an inhibitory immune checkpoint molecule. Exemplary inhibitory immune checkpoint molecules include, but are not limited to, CTLA-4, TIM-3, A2a Receptor, LAG-3, BTLA, KIR, PD-1, IDO, CD47, and ligands thereof such as B7.1, B7.2, PDL1, PD-L2, HVEM, B7-H4, NKTR-218, and SIRP-alpha receptor.

### Target Binding Moiety (TBM)

[0216] In some embodiments, the target binding moiety (TBM) comprises an antibody light chain variable region (VL) and/or an antibody heavy chain variable region (VH). In some embodiments, the TBM comprises a VL. In some embodiments, the TBM comprises a VH. In some embodiments, a TBM comprises a VL and/or a VH specificity for any target of interest, including, for example, CTLA4, CD137, PD1, PDL1, PDL2, LAG3, TIM3, B7-H3, OX40, CD3, CD19, CD20, CD40, CD95, CD120a, BTLA, VISTA, ICOS, BCMA, HER1, HER2, HER3, and/or B7-H4.

[0217] In some embodiments, the TBM is an antigen binding fragment, including, but not limited to: (i) a Fab fragment, which is a monovalent fragment consisting of the VL, VH, CL and CH1 domains; (ii) a F(ab′)₂ fragment, which is a bivalent fragment comprising two Fab fragments linked by a disulfide bridge at the hinge region; (iii) a Fd fragment consisting of the VH and CH1 domains; (iv) a Fv fragment consisting of the VL and VH domains of a single arm of an antibody; (v) a dAb fragment (Ward et al., (1989) Nature 341:544-546), which consists of a VH domain; (vi) an isolated CDR, and (vii) single chain antibody (scFv), which is a polypeptide comprising a VL region of an antibody linked to a VH region of an antibody (see e.g., Bird et al. (1988) Science 242:423-426; Huston et al. (1988) Proc. Natl. Acad. Sci. USA 85:5879-5883).

[0218] In some embodiments, the TBM is a scFv comprising from the N-terminus to the C-terminus: VL-L1-VH, wherein L1 is a peptide linker. In some embodiments, the TBM is a scFv comprising from the N-terminus to the C-terminus: VH-L1-VL, wherein L1 is a peptide linker. In some embodiment, L1 comprises the amino acid sequence of SEQ ID NO: 82. In some embodiments, the TBM is a scFv comprising an engineered disulfide bond between VH and VL, such as between C44 of VH and C100 of VL, wherein the numbering is based on Kabat numbering. In some embodiments, the scFv comprises a first cysteine residue at position 44 in the VH and a second cysteine residue at position 100 in the VL, wherein the first cysteine residue and the second cysteine residue form a disulfide bond, and wherein the numbering is based on Kabat numbering.

[0219] In some embodiments, the TBM comprises a full-length antibody light chain and/or a full-length antibody heavy chain. The antibody light chain may be a kappa or lambda light chain. The antibody heavy chain may be in any class, such as IgG, IgM, IgE, IgA, or IgD. In some embodiments, the antibody heavy chain is in the IgG class, such as IgG1, IgG2, IgG3, or IgG4 subclass. An antibody heavy chain described herein may be converted from one class or subclass to another class or subclass using methods known in the art.

[0220] The multispecific antibodies described herein may comprise TBMs derived from any suitable antibodies targeting antigens of interest. The TBMs described herein may incorporate any of the CDR sequences (e.g. one, two, or three of the heavy chain variable region CDR sequences, and/or one, two, or three of the light chain variable region CDR sequences), heavy chain variable region sequences, and/or light chain variable region sequences of any of the antibodies described in WO2019/036856, WO2019/036842, WO2019/036855, WO2019148444, WO2019185035, WO2019036855, which are incorporated herein by reference in their entirety. Table C below shows antibody CDRs, VH, VL, scFv sequences of exemplary TBMs thereof described herein.

TABLE C
Exemplary multispecific antibodies

| SEQ ID NO | Antibody sequence | Amino acid sequence (underlined are CDR sequences) |
|---|---|---|
| 37 | PDL1 CDR-H1 | YSISSGYYWG |
| 38 | PDL1 CDR-H2 | GIIYPSGGGTNYAQKFQG |
| 39 | PDL1 CDR-H3 | GGGLGFDY |
| 40 | PDL1 CDR-L1 | RASQSIPSFLN |
| 41 | PDL1 CDR-L2 | AASSLQS |
| 42 | PDL1 CDR-L3 | QHYISWPRQFT |
| 43 | PDL1 VH | EVQLVESGGGLVQPGGSLRLSCAASG [symbol] [symbol] WIRQAPGKGLEWI |
| | | [symbol] [symbol] RVTISRDNSKNTLYLQLNSLRAEDTAVYYCA |
| | | R [symbol] WGQGTLVTVSS |
| 44 | PDL1 VL | DIQLTQSPSSLSASVGDRVTITC [symbol] WYQQKPGKAPKLLIY |
| | | [symbol] GVPSRFSGSGSGTDFTLTISSLQPEDFATYYC [symbol] |
| | | [symbol] FGQGTKVEIKR |
| 45 | CD137 CDR-H1 | FSLSTGGVGVG |
| 46 | CD137 CDR-H2 | ALIDWADDKYYSPSLKS |
| 47 | CD137 CDR-H3 | GGSDTVIGDWFAY |
| 48 | CD137 CDR-L1 | RASQSIGSYLA |
| 49 | CD137 CDR-L2 | DASNLET |
| 50 | CD137 CDR-L3 | QQGYYLWT |
| 51 | CD137 VH | EVQLVESGGGLVQPGGSLRLSCAASG [symbol] [symbol] WIRQAPGKGLEW |
| | | L [symbol] [symbol] RLTISRDNSKNTLYLQLNSLRAEDTAVYYCA |
| | | R [symbol] [symbol] WGQGTLVTVSS |
| 52 | CD137 VL | DIQLTQSPSSLSASVGDRVTITC [symbol] WYQQKPGKAPKLLIY |
| | | [symbol] GVPSRFSGSGSGTDFTLTISSLQPEDFATYYC [symbol] |
| | | FGQGTKVEIKR |
| 53 | CTLA4 CDR-H1 | YSISSGYHWS |
| 54 | CTLA4 CDR-H2 | ARIDWDDDKYYSTSLKS |
| 55 | CTLA4 CDR-H3 | SYVYFDY |
| 56 | CTLA4 CDR-L1 | RASQSVRGRFLA |
| 57 | CTLA4 CDR-L2 | DASNRAT |
| 58 | CTLA4 CDR-L3 | QQSSSWPPT |
| 59 | CTLA4 VH | EVQLVESGGGLVQPGGSLRLSCAASG [symbol] [symbol] WIRQAPGKGLEWL |
| | | [symbol] [symbol] RLTISRDNSKNTLYLQLNSLRAEDTAVYYCAR |
| | | [symbol] WGQGTLVTVSS |
| 60 | CTLA4 VL | DIQLTQSPSSLSASVGDRVTITC [symbol] [symbol] WYQQKPGKAPKLLI |
| | | Y [symbol] GIPSRFSGSGSGTDFTLTISSLQPEDFATYYC [symbol] |
| | | FGQGTKVEIKR |
| 61 | CD3 CDR-H1 | FTFNTYAVIN |
| 62 | CD3 CDR-H2 | GRIRSKYNNYATYYADSVKG |
| 63 | CD3 CDR-H3 | HGNFGNSYVSWFAY |
| 64 | CD3 CDR-L1 | GSSTGAVTTSNYAN |
| 65 | CD3 CDR-L2 | GTNKRAP |
| 66 | CD3 CDR-L3 | WYSNLWV |
| 67 | CD3 VH | EVQLVESGGGLVQPGGSLRLSCAASG [symbol] WVRQAPGKGLEWV |
| | | [symbol] [symbol] RFTISRDDSKNTLYLQMNSLRAEDTAVY |
| | | YCVR [symbol] [symbol] WGQGTLVTVSS |
| 68 | CD3 VL | QAVVTQEPSLTVSPGGTVTLTC [symbol] [symbol] WVQQKPGQAPRGL |
| | | IG [symbol] GVPARFSGSLLGGKAALTLSGAQPEDEAEYYCAL |
| | | [symbol] FGGGTKLTVL |
| 69 | HER2 CDR-H1 | FNIKDTYIH |
| 70 | HER2 CDR-H2 | ARIYPTNGYTRYADSVKG |
| 71 | HER2 CDR-H3 | WGGDGFYAMDY |
| 72 | HER2 CDR-L1 | RASQDVNTAVA |
| 73 | HER2 CDR-L2 | SASFLYS |
| 74 | HER2 CDR-L3 | QQHYTTPPT |
| 75 | HER2 VH | EVQLVESGGGLVQPGGSLRLSCAASG [symbol] WVRQAPGKGLEWV |
| | | [symbol] [symbol] RFTISADTSKNTAYLQMNSLRAEDTAVYYCS |
| | | R [symbol] WGQGTLVTVSS |
| 76 | HER2 VL | DIQMTQSPSSLSASVGDRVTITC [symbol] WYQQKPGKAPKLLIY |
| | | [symbol] GVPSRFSGSRSGTDFTLTISSLQPEDFATYYC [symbol] |
| | | FGQGTKVEIKR |
| 77 | anti-PDL1 scFv | EVQLVESGGGLVQPGGSLRLSCAASGYSISSGYYWGWIRQAPGKGLEWIG |
| | | IIYPSGGGTNYAQKIQGRVTISRDNSKNTLYLQLNSLRAEDTAVYYCARG |
| | | GGLGFDYWGQGTLVTVSSGGGGSGGGGSGGGGSGGGGSDIQLTQSPSSLS |
| | | ASVGDRVTITCRASQSIPSFLNWYQQKPGKAPKLLIYAASSLQSGVPSRF |
| | | SGSGSGTDFTLTISSLQPEDFATYYCQHYISWPRQFTFGQGTKVEIKR |
| 78 | anti-CD137 scFv | EVQLVESGGGLVQPGGSLRLSCAASGFSLSTGGVGVGWIRQAPGKGLEWL |
| | | ALIDWADDKYYSPSLKSRLTISRDNSKNTLYLQLNSLRAEDTAVYYCARG |
| | | GSDTVIGDWFAYWGQGTLVTVSSGGGGSGGGGSGGGGSGGGGSDIQLFQS |
| | | PSSLSASVGDRVTITCRASQSIGSYLAWYQQKPGKAPKLLIYDASNLETG |
| | | VPSRFSGSGSGTDFTLTISSLQPEDFATYYCQQGYYLWTFGQGTKVEIKR |
| 79 | anti-CD3 scFv | QAVVTQEPSLTVSPGGTVTLTCGSSTGAVTTSNYANWVQQKPGQAPRGLI |
| | | GGTNKRAPGVPARFSGSLLGGKAALTLSGAQPEDEAEYYCALWYSNLWVF |
| | | GGGTKLTVLRGGGGSGGGGSGGGGSGGGGSEVQLVESGGGLVQPGGSLRL |
| | | SCAASGFTFNTYAMNWVRQAPGKGLEWVGRIRSKYNNYATYYADSVKGRF |
| | | TISRDDSKNTLYLQMNSLRAEDTAVYYCVRHGNFGNSYVSWFAYWGQGTL |
| | | VTVSS |
| 83 | anti-CTLA4 scFv | EVQLVESGGGLVQPGGSLRLSCAASGYSISSGYHWSWIRQAPGKGLEWLA |
| | | RIDWDDDKYYSTSLKSRLTISRDNSKNTLYLQLNSLRAEDTAVYYCARSY |
| | | VYFDYWGQGTLVTVSSGGGGSGGGGSGGGGSGGGGSDIQLTQSPSSLSAS |
| | | VGDRVTITCRASQSVRGRFLAWYQQKPGKAPKLLIYDASNRATGIPSRFS |
| | | GSGSGTDFTLTISSLQPEDFATYYCQQSSSWPPTFGQGTKVEIKR |

[0221] In some embodiments, the TBM is an anti-PDL1 antibody or antigen binding domain thereof, including, e.g., a VH, VL, scFv, light chain, or heavy chain (such as IgG1, IgG2 IgG4). Any of the known anti-PD-L1 antibodies may be used in the present invention, see, for example, U.S. Pat. Nos. 7,943,743, 7,722,868, 8,217,149, 8,383,796, 8,552,154, and 9,102,725; and U.S. Patent Application Publication Nos. US20140341917, and US20150203580; and International Patent Application No. PCT/US2001/020964. Exemplary anti-PD-L1 antibodies include, but are not limited to, BMS935559 (also known as MDX-1105), MPDL3280A, MEDI4736, Avelumab (also known as MSB0010718C), KY-1003, MCLA-145, RG7446 (also known as atezolizumab), SHR-1316, STI-3031, ZKAB001, TQB2450, LY3300054 and STI-A1010.

[0222] In some embodiments, the TBM comprises a VH comprising an antibody heavy chain complementarity determining region (CDR-H) 1 comprising the amino acid sequence of SEQ ID NO: 37, a CDR-H2 comprising the amino acid sequence of SEQ ID NO: 38, and/or a CDR-H3 comprising the amino acid sequence of SEQ ID NO: 39. In some embodiments, the TBM comprises a VL comprising an antibody light chain complementarity determining region (CDR-L) I comprising the amino acid sequence of SEQ ID NO: 40, a CDR-L2 comprising the amino acid sequence of SEQ ID NO: 41, and/or a CDR-L3 comprising the amino acid sequence of SEQ ID NO: 42. In some embodiments, the TBM comprises a VH comprising the amino acid sequence of SEQ ID NO: 43. In some embodiments, the TBM comprises a VL comprising the amino acid sequence of SEQ ID NO: 44. In some embodiments, the TBM comprises a scFv comprising the amino acid sequence of SEQ ID NO: 77.

[0223] In some embodiments, the TBM is an anti-CD137 antibody or antigen binding domain thereof, including, e.g., a VH, VL, scFv, light chain, or heavy chain (such as IgG1, IgG2, IgG4). Any of the known anti-CD137 antibodies may be used in the present invention, for example, see, WO2016/134358. Exemplary anti-CD137 antibodies include, but are not limited to, Urelumab (also known as BMS-663513), Utomilumab (also known as PF-05082566), CTX-471, ATOR-1017 and AGEN2373.

[0224] In some embodiments, the TBM comprises a VH comprising an CDR-H1 comprising the amino acid sequence of SEQ ID NO: 45, a CDR-H2 comprising the amino acid sequence of SEQ ID NO: 46, and/or a CDR-H3 comprising the amino acid sequence of SEQ ID NO: 47. In some embodiments, the TBM comprises a VL comprising a CDR-L1 comprising the amino acid sequence of SEQ ID NO: 48, a CDR-L2 comprising the amino acid sequence of SEQ ID NO: 49, and/or a CDR-L3 comprising the amino acid sequence of SEQ ID NO: 50. In some embodiments, the TBM comprises a VH comprising the amino acid sequence of SEQ ID NO: 51. In some embodiments, the TBM comprises a VL comprising the amino acid sequence of SEQ ID NO: 52. In some embodiments, the TBM comprises a scFv comprising the amino acid sequence of SEQ ID NO: 78.

[0225] In some embodiments, the TBM is an anti-CTLA4 antibody or antigen binding domain thereof, including, e.g., a VH, VL, scFv, light chain, or heavy chain (such as IgG1, IgG2, IgG4). Any of the known anti-CTLA4 antibodies may be used in the present invention, including but not limited to, Ipilimumab (see U.S. Pat. Nos. 6,984,720, 7,452,535, 7,605,238, 8,017,114 and 8,142,778), Tremilimumab (see U.S. Pat. Nos. 6,68,736, 7,109,003, 7,132,281, 7,411,057, 7.807,797, 7,824,679 and 8,143,379) and other anti-CTLA-4 antibodies, such as single chain antibodies (e.g., see U.S. Pat. Nos. 5,811,097, 6,051,227 and 7,229,628, US Patent Publication No. US20110044953, US Patent Publication No. US2018037654, US Patent Publication No. US2009025274. US Patent Publication No. US2019127468, International Patent Publication No. WO2019/152413, International Patent Publication No. WO2018209701, International Patent Publication No. WO2018/202649 and International Patent Publication No. WO2019/152423). Other exemplary anti-CTLA-4 antibodies include RG2077, ONC-392, CS1002, BCD-145, IBI310. AGEN1884, AGEN1181 and AGEN2041.

[0226] In some embodiments, the TBM comprises a VH comprising an CDR-HI comprising the amino acid sequence of SEQ ID NO: 53, a CDR-H2 comprising the amino acid sequence of SEQ ID NO: 54, and/or a CDR-H3 comprising the amino acid sequence of SEQ ID NO: 55. In some embodiments, the TBM comprises a VL comprising a CDR-L1 comprising the amino acid sequence of SEQ ID NO: 56, a CDR-L2 comprising the amino acid sequence of SEQ ID NO: 57, and/or a CDR-L3 comprising the amino acid sequence of SEQ ID NO: 58. In some embodiments, the TBM comprises a VH comprising the amino acid sequence of SEQ ID NO: 59. In some embodiments, the TBM comprises a VL comprising the amino acid sequence of SEQ ID NO: 60. In some embodiments, the TBM comprises a scFv comprising the amino acid sequence of SEQ ID NO: 83.

[0227] In some embodiments, the TBM is an anti-CD3 antibody or antigen binding domain thereof, including, e.g., a VH, VL, scFv, light chain, or heavy chain (such as IgG1, IgG2, IgG4). Any of the known anti-CD3 antibodies may be used in the present invention, including but not limited to, the Cris-7 monoclonal antibody (Reinherz, E. L. et al. (eds.), Leukocyte typing II, Springer Verlag, New York, (1986)), BC3 monoclonal antibody (Anasetti et al. (1990) J. Exp. Med. 172:1691), OKT3 (Ortho multicenter Transplant Study Group (1985) N. Engl. J. Med. 313:337) and derivatives thereof such as OKT3 ala-ala (Herold et al. (2003) J. Clin. Invest. 11:409), visilizumab (Carpenter et al. (2002) Blood 99:2712), and 145-2C11 monoclonal antibody (Hirsch et al. (1988) J. Immunol. 140: 3766), Otelixizumab and Foralumab. Further CD3 binding molecules contemplated herein include UCHT-1 (Beverley, P C and Callard, R. E. (1981) Eur. J. Immunol. 11: 329-334, SP34 (Silvana et. al. (1985) The EMBO Journal. 4:337-344) and CD3 binding molecules described in WO2004/106380; WO2010/037838; WO2008/119567; WO2007/042261: WO2010/0150918; WO2018/052503; WO2016/204966.

[0228] In some embodiments, the TBM comprises a VH comprising an CDR-HI comprising the amino acid sequence of SEQ ID NO: 61, a CDR-H2 comprising the amino acid sequence of SEQ ID NO: 62, and/or a CDR-H3 comprising the amino acid sequence of SEQ ID NO: 63. In some embodiments, the TBM comprises a VL comprising a CDR-L1 comprising the amino acid sequence of SEQ ID NO: 64, a CDR-L2 comprising the amino acid sequence of SEQ ID NO: 65, and/or a CDR-L3 comprising the amino acid sequence of SEQ ID NO: 66. In some embodiments, the TBM comprises a VH comprising the amino acid sequence of SEQ ID NO: 67. In some embodiments, the TBM comprises a VL comprising the amino acid sequence of SEQ ID NO: 68. In some embodiments, the TBM comprises a scFv comprising the amino acid sequence of SEQ ID NO: 79.

[0229] In some embodiments, the TBM is an anti-HER2 antibody or antigen binding domain thereof, including, e.g., a VH, VL, scFv, light chain, or heavy chain (such as IgG1, IgG2, IgG4). Any of the known anti-HER2 antibodies may be used in the present invention, including but not limited to, Herceptin (1998, Cancer Res 58 (13):2825-2831), MDXH210 (Schwaab et al., 2001, Journal of Immunotherapy, 24(1):79-87), Disitamab (Toxicol Lett. 2019. S0378-4274(19)30421-7), Pertuzumab (Agus D B, Gordon M S, Taylor C, et al. J Clin Oncol. 2005; 23(11):2534-2543).

[0230] In some embodiments, the TBM comprises a VH comprising an CDR-H1 comprising the amino acid sequence of SEQ ID NO: 69, a CDR-H2 comprising the amino acid sequence of SEQ ID NO: 70, and/or a CDR-H3 comprising the amino acid sequence of SEQ ID NO: 71. In some embodiments, the TBM comprises a VL comprising a CDR-L1 comprising the amino acid sequence of SEQ ID NO: 72, a CDR-L2 comprising the amino acid sequence of SEQ ID NO: 73, and/or a CDR-L3 comprising the amino acid sequence of SEQ ID NO: 74. In some embodiments, the TBM comprises a VH comprising the amino acid sequence of SEQ ID NO: 75. In some embodiments, the TBM comprises a VL comprising the amino acid sequence of SEQ ID NO: 76.

[0231] The term “PDL1” as used in the present application includes human PDL1 (e.g., UniProt accession number Q9NZQ7), as well as variants, isoforms, and species homologs thereof (e.g., mouse PDL1 (UniProt accession number Q9EP73), rat PDL1 (UniProt accession number P52944), dog PDL1 (UniProt accession number E2RKZ5), cynomolgus monkey PDL1, etc.).

[0232] The term “CTLA4” as used in the present application includes human CTLA4 (e.g., UniProt accession number P16410), as well as variants, isoforms, and species homologs thereof (e.g., mouse CTLA4 (UniProt accession number P09793), rat CTLA4 (UniProt accession number Q9Z1 A7), dog CTLA4 (UniProt accession number Q9XSI1), cynomolgus monkey CTLA4 (UniProt accession number G7PL88), etc.).

[0233] The term “CD137” as used in the present application includes the human CD137 (e.g., GenBank Accession No. NM_001561; NP_001552), as well as variants, isoforms, and species homologs thereof (e.g., mouse CD137 (GenBank Gene ID 21942), rat CD137 (GenBank Gene ID 500590), dog CD137 (GenBank Gene ID 608274), cynomolgus monkey CTLA4 (GenBank Gene ID 102127961), etc.).

[0234] The term “CD3” is known in the art as a multi-protein complex of six chains (see, Abbas and Lichtman, 2003; Janeway et al., p172 and 178, 1999). In mammals, the complex comprises a CD3 gamma chain, a CD3 delta chain, two CD3 epsilon chains, and a homodimer of CD3 zeta chains. The CD3 gamma, CD3 delta, and CD3 epsilon chains are highly related cell surface proteins of the immunoglobulin superfamily containing a single immunoglobulin domain. The transmembrane regions of the CD3 gamma, CD3 delta, and CD3 epsilon chains are negatively charged, which is a characteristic that allows these chains to associate with the positively charged T cell receptor chains. The intracellular tails of the CD3 gamma, CD3 delta, and CD3 epsilon chains each contain a single conserved motif known as an immunoreceptor tyrosine-based activation motif or ITAM, whereas each CD3 zeta chain has three. Without being bound by theory, it is believed the ITAMs are important for the signaling capacity of a TCR complex. CD3 as used herein may be from various animal species, including human, primate, mouse, rat, or other mammals. For example, CD3 as used herein includes human CD3e (i.e., CD3 epsilon; e.g., UniProt accession number P07766), as well as variants, isoforms, and species homologs thereof (e.g., mouse CD3e (UniProt accession number P22646), rat CD3e (UniProt accession number A0A0G2K986), dog CD3e (UniProt accession number P27597), and cynomolgus monkey CD3e (UniProt accession number Q95LI5)).

[0235] The term “HER2” as used in the present application includes human HER2 (e.g., UniProt accession number P04626), as well as variants, isoforms, and species homologs thereof (e.g., mouse HER2 (UniProt accession number P70424), rat HER2 (UniProt accession number P06494), dog HER2, cynomolgus monkey HER2. HER2 is also known as ERBB2.

[0236] The TBMs described herein may bind a human target (e.g., PDL1, CTLA4, CD137, CD3 or HER2). In some cases, a TBM may be completely specific for the human target and may not exhibit species or other types of cross-reactivity. In other cases, a TBM also binds targets from species other than human.

### Linker

[0237] The multispecific antibodies described herein may comprise one or more linkers (e.g., L1, L2, L3, etc.) disposed between the various regions in the polypeptides.

[0238] Any suitable linker (e.g., a flexible linker) known in the art may be used, including, for example: glycine polymers (G)n, where n is an integer of at least 1 (e.g., at least one, at least 2, at least 3, at least 4, at least 5, at least 6, at least 7, at least 8, at least 9, at least 10, etc.); glycine-serine polymers (GS)n, where n is an integer of at least 1 (e.g., at least one, at least 2, at least 3, at least 4, at least 5, at least 6, at least 7, at least 8, at least 9, at least 10, etc.) such as SGGGS (SEQ ID NO: 80), GGGSGGGGS (SEQ ID NO: 81), (G₄S)₄ (SEQ ID NO: 82), GGGGS (SEQ ID NO: 130), SGGS (SEQ ID NO: 131), GGSG (SEQ ID NO: 132), GGSGG (SEQ ID NO: 133), GSGSG (SEQ ID NO: 134), GSGGG (SEQ ID NO: 135), GGGSG (SEQ ID NO: 136), and/or GSSSG (SEQ ID NO: 137)); glycine-alanine polymers: alanine-serine polymers; and the like. Linker sequences may be of any length, such as from about 1 amino acid (e.g., glycine or serine) to about 20 amino acids (e.g., 20 amino acid glycine polymers or glycine-serine polymers), about 1 amino acid to about 15 amino acids, about 3 amino acids to about 12 amino acids, about 4 amino acids to about 10 amino acids, about 5 amino acids to about 9 amino acids, about 6 amino acids to about 8 amino acids, etc. In some embodiments, the linker is any of about 1, 2, 3, 4, 5, 6, 7, 8, 9, 10, 11, 12, 13, 14, 15, 16, 17, 18, 19, or 20 amino acids in length.

### Exemplary Multispecific Antibodies

[0239] Exemplary multispecific antibodies described herein include, but are not limited to, bispecific antibodies targeting PDL1 and CD137 (e.g., PDL1×CD137 and CD137×PDL1 antibodies), bispecific antibodies targeting CD137 and CTLA4 (e.g., CD137×CTLA4 antibody), bispecific T-cell engagers (BiTE) targeting CD3 and a cell surface antigen, and trispecific antibodies targeting PDL1, CD137 and CTLA4 (also referred herein as PDL1×CD137×CTLA4 antibody). In some embodiments, the multispecific antibody comprises CH3 domains or Fc regions comprising any one or combination of engineered disulfide bonds and/or salt bridges described herein. In some embodiments, the multispecific antibody does not comprise CH3 domains or Fc regions comprising any one or combination of engineered disulfide bonds and/or salt bridges described herein.

[0240] In some embodiments, there is provided a bispecific antibody targeting PDL1 and CD137, comprising a first polypeptide and a second polypeptide, wherein:

[0241] (i) the first polypeptide comprises a structure represented by the formula:

VH1-CH1-hinge-CH2-first CH3-L1-scFv1; and

[0242] (ii) the second polypeptide comprises a structure represented by the formula:

VL-CL;

wherein:

[0243] VL is an immunoglobulin light chain variable domain;

[0244] VH is an immunoglobulin heavy chain variable domain;

[0245] scFv is a single-chain variable fragment:

[0246] CL is an immunoglobulin light chain constant domain;

[0247] CH1 is an immunoglobulin heavy chain constant domain 1;

[0248] CH2 is an immunoglobulin heavy chain constant domain 2:
[0249] hinge is an immunoglobulin hinge region connecting the CH1 and CH2 domains;
[0250] and L1 is a bond or a peptide linker;
   wherein VL and VH associate to form an Fv that specifically binds to a CD137; wherein the scFv specifically binds to PDL1. In some embodiments, the scFv comprises a VH comprising a CDR-H1 comprising the amino acid sequence of SEQ ID NO: 37, a CDR-H2 comprising the amino acid sequence of SEQ ID NO: 38, and a CDR-H3 comprising the amino acid sequence of SEQ ID NO: 39; and/or a VL comprising a CDR-L1 comprising the amino acid sequence of SEQ ID NO: 40, a CDR-L2 comprising the amino acid sequence of SEQ ID NO: 41, and a CDR-L3 comprising the amino acid sequence of SEQ ID NO: 42. In some embodiments, the scFv comprises a VH comprising the amino acid sequence of SEQ ID NO: 43, and/or a VL comprising the amino acid sequence of SEQ ID NO: 44. In some embodiments, the scFv comprises from the N-terminus to the C-terminus: VH-L1-VL, wherein L1 is a peptide linker. In some embodiment, L1 comprises the amino acid sequence of SEQ ID NO: 82. In some embodiments, the scFv comprises a first cysteine residue at position 44 in the VH and a second cysteine residue at position 100 in the VL, wherein the first cysteine residue and the second cysteine residue form a disulfide bond, and wherein the numbering is based on Kabat numbering. In some embodiments, the scFv comprises the amino acid sequence of SEQ ID NO: 77. In some embodiments, the Fv comprises a VH comprising an CDR-HI comprising the amino acid sequence of SEQ ID NO: 45, a CDR-H2 comprising the amino acid sequence of SEQ ID NO: 46, and a CDR-H3 comprising the amino acid sequence of SEQ ID NO: 47; and/or a VL comprising a CDR-L1 comprising the amino acid sequence of SEQ ID NO: 48, a CDR-L2 comprising the amino acid sequence of SEQ ID NO: 49, and a CDR-L3 comprising the amino acid sequence of SEQ ID NO: 50. In some embodiments, the Fv comprises a VH comprising the amino acid sequence of SEQ ID NO: 51 and/or a VL comprising the amino acid sequence of SEQ ID NO: 52. In some embodiments, the first CH3 domain comprises N390C substitution and the second CH3 domain comprises S400C substitution, or the first CH3 domain comprises S400C substitution and the second CH3 domain comprises N390C substitution. In some embodiments, the multispecific antibody comprises an IgG1 Fc region, such as an IgG1 Fc having an N297A substitution. In some embodiments, the multispecific antibody comprises an IgG4 Fc region, such as an IgG4 having a S228P substitution. In some embodiments, the scFv is linked to the hinge in the second polypeptide via a linker, such as a peptide linker comprising the amino acid sequence of SEQ ID NO: 80 or 81.

[0251] In some embodiments, there is provided a bispecific antibody comprising a first polypeptide comprising the amino acid sequence of SEQ ID NO: 96, and a second polypeptide comprising the amino acid sequence of SEQ ID NO: 97. In some embodiments, there is provided a bispecific antibody comprising a first polypeptide comprising the amino acid sequence of SEQ ID NO: 98, and a second polypeptide comprising the amino acid sequence of SEQ ID NO: 99. In some embodiments, there is provided a bispecific antibody comprising a first polypeptide comprising the amino acid sequence of SEQ ID NO: 100, and a second polypeptide comprising the amino acid sequence of SEQ ID NO: 101. In some embodiments, there is provided a bispecific antibody comprising a first polypeptide comprising the amino acid sequence of SEQ ID NO: 102, and a second polypeptide comprising the amino acid sequence of SEQ ID NO: 103. In some embodiments, there is provided a bispecific antibody comprising a first polypeptide comprising the amino acid sequence of SEQ ID NO: 104, and a second polypeptide comprising the amino acid sequence of SEQ ID NO: 105. In some embodiments, there is provided a bispecific antibody comprising a first polypeptide comprising the amino acid sequence of SEQ ID NO: 106, and a second polypeptide comprising the amino acid sequence of SEQ ID NO: 107. In some embodiments, there is provided a bispecific antibody comprising a first polypeptide comprising the amino acid sequence of SEQ ID NO: 108, and a second polypeptide comprising the amino acid sequence of SEQ ID NO: 109. In some embodiments, there is provided a bispecific antibody comprising a first polypeptide comprising the amino acid sequence of SEQ ID NO: 110, and a second polypeptide comprising the amino acid sequence of SEQ ID NO: 111.

[0252] In some embodiments, there is provided a bispecific antibody targeting PDL1 and CD137, comprising a first polypeptide and a second polypeptide, wherein:

[0253] (i) the first polypeptide comprises a structure represented by the formula:

VH1-CH1-hinge-CH2-first CH3-L1-scFv1; and

[0254] (ii) the second polypeptide comprises a structure represented by the formula:

VL-CL;

wherein:

[0255] VL is an immunoglobulin light chain variable domain;

[0256] VH is an immunoglobulin heavy chain variable domain;

[0257] scFv is a single-chain variable fragment:

[0258] CL is an immunoglobulin light chain constant domain;

[0259] CH1 is an immunoglobulin heavy chain constant domain 1;

[0260] CH2 is an immunoglobulin heavy chain constant domain 2:
[0261] hinge is an immunoglobulin hinge region connecting the CH1 and CH2 domains;
[0262] and L1 is a bond or a peptide linker;
   wherein VL and VH associate to form an Fv that specifically binds to PDL1; and
   wherein the scFv specifically binds to CD137. In some embodiments, the Fv comprises a VH comprising a CDR-H1 comprising the amino acid sequence of SEQ ID NO: 37, a CDR-H2 comprising the amino acid sequence of SEQ ID NO: 38, and a CDR-H3 comprising the amino acid sequence of SEQ ID NO: 39; and/or a VL comprising a CDR-L1 comprising the amino acid sequence of SEQ ID NO: 40, a CDR-L2 comprising the amino acid sequence of SEQ ID NO: 41, and a CDR-L3 comprising the amino acid sequence of SEQ ID NO: 42. In some embodiments, the Fv comprises a VH comprising the amino acid sequence of SEQ ID NO: 43, and/or a VL comprising the amino acid sequence of SEQ ID NO: 44. In some embodiments, the scFv comprises a VH comprising an CDR-H1 comprising the amino acid sequence of SEQ ID NO: 45, a CDR-H2 comprising the amino acid sequence of SEQ ID NO: 46, and a CDR-H3 comprising the amino acid sequence of SEQ ID NO: 47; and/or a VL comprising a CDR-L1 comprising the amino acid sequence of SEQ ID NO: 48, a CDR-L2 comprising the amino acid sequence of SEQ ID NO: 49, and a CDR-L3 comprising the amino acid sequence of SEQ ID NO: 50. In some embodiments, the scFv comprises a VH comprising the amino acid sequence of SEQ ID NO: 51 and/or a VL comprising the amino acid sequence of SEQ ID NO: 52. In some embodiments, the scFv comprises from the N-terminus to the C-terminus: VH-L1-VL, wherein L1 is a peptide linker. In some embodiment, L1 comprises the amino acid sequence of SEQ ID NO: 82. In some embodiments, the scFv comprises a first cysteine residue at position 44 in the VH and a second cysteine residue at position 100 in the VL, wherein the first cysteine residue and the second cysteine residue form a disulfide bond, and wherein the numbering is based on Kabat numbering. In some embodiments, the scFv comprises the amino acid sequence of SEQ ID NO: 78. In some embodiments, the first CH3 domain comprises N390C substitution and the second CH3 domain comprises S400C substitution, or the first CH3 domain comprises S400C substitution and the second CH3 domain comprises N390C substitution. In some embodiments, the multispecific antibody comprises an IgG1 Fc region, such as an IgG1 Fc having an N297A substitution. In some embodiments, the multispecific antibody comprises an IgG4 Fc region, such as an IgG4 having a S228P substitution. In some embodiments, the scFv is linked to the hinge in the second polypeptide via a linker, such as a peptide linker comprising the amino acid sequence of SEQ ID NO: 80 or 81.

[0263] In some embodiments, there is provided a bispecific antibody comprising a first polypeptide comprising the amino acid sequence of SEQ ID NO: 84, and a second polypeptide comprising the amino acid sequence of SEQ ID NO: 85. In some embodiments, there is provided a bispecific antibody comprising a first polypeptide comprising the amino acid sequence of SEQ ID NO: 86, and a second polypeptide comprising the amino acid sequence of SEQ ID NO: 87. In some embodiments, there is provided a bispecific antibody comprising a first polypeptide comprising the amino acid sequence of SEQ ID NO: 88, and a second polypeptide comprising the amino acid sequence of SEQ ID NO: 89. In some embodiments, there is provided a bispecific antibody comprising a first polypeptide comprising the amino acid sequence of SEQ ID NO: 90, and a second polypeptide comprising the amino acid sequence of SEQ ID NO: 91. In some embodiments, there is provided a bispecific antibody comprising a first polypeptide comprising the amino acid sequence of SEQ ID NO: 92, and a second polypeptide comprising the amino acid sequence of SEQ ID NO: 93. In some embodiments, there is provided a bispecific antibody comprising a first polypeptide comprising the amino acid sequence of SEQ ID NO: 94, and a second polypeptide comprising the amino acid sequence of SEQ ID NO: 95.

[0264] In some embodiments, there is provided a trispecific antibody targeting PDL1, CD137 and CTLA4, comprising a first polypeptide, a second polypeptide, and a third polypeptide, wherein:

[0265] (i) the first polypeptide comprises a structure represented by the formula:

VH-CH1-hinge-CH2-first CH3-L1-scFv1;

[0266] (ii) the second polypeptide comprises a structure represented by the formula:

VH-CH1-hinge-CH2-second CH3-L2-scFv2;

[0267] (iii) the third polypeptide comprises a structure represented by the formula:

VL-CL; and

[0268] (iv) the fourth polypeptide comprises a structure represented by the formula:

VL-CL;

wherein:

[0269] VH is an immunoglobulin light chain variable domain;

[0270] VL is an immunoglobulin light chain variable domain;

[0271] scFv1 is a first single-chain variable fragment;

[0272] CL is an immunoglobulin light chain constant domain;

[0273] CH1 is an immunoglobulin heavy chain constant domain 1;

[0274] CH2 is an immunoglobulin heavy chain constant domain 2:
[0275] hinge is an immunoglobulin hinge region connecting the CH1 and CH2 domains; and
[0276] L1 and L2 are independently a bond or a peptide linker;
   wherein VL and VH associate to form an Fv that specifically binds to CD137; wherein scFv1 specifically binds to PD-L1, and scFv2 specifically binds to CTLA4. In some embodiments, the scFv1 comprises a VH comprising a CDR-H1 comprising the amino acid sequence of SEQ ID NO: 37, a CDR-H2 comprising the amino acid sequence of SEQ ID NO: 38, and a CDR-H3 comprising the amino acid sequence of SEQ ID NO: 39; and/or a VL comprising a CDR-L1 comprising the amino acid sequence of SEQ ID NO: 40, a CDR-L2 comprising the amino acid sequence of SEQ ID NO: 41, and a CDR-L3 comprising the amino acid sequence of SEQ ID NO: 42. In some embodiments, the scFv1 comprises a VH comprising the amino acid sequence of SEQ ID NO: 43, and/or a VL comprising the amino acid sequence of SEQ ID NO: 44. In some embodiments, the Fv comprises a VH comprising an CDR-H1 comprising the amino acid sequence of SEQ ID NO: 45, a CDR-H2 comprising the amino acid sequence of SEQ ID NO: 46, and a CDR-H3 comprising the amino acid sequence of SEQ ID NO: 47; and/or a VL comprising a CDR-L1 comprising the amino acid sequence of SEQ ID NO: 48, a CDR-L2 comprising the amino acid sequence of SEQ ID NO: 49, and a CDR-L3 comprising the amino acid sequence of SEQ ID NO: 50. In some embodiments, the Fv comprises a VH comprising the amino acid sequence of SEQ ID NO: 51 and/or a VL comprising the amino acid sequence of SEQ ID NO: 52. In some embodiments, the scFv2 comprises a VH comprising an CDR-HI comprising the amino acid sequence of SEQ ID NO: 53, a CDR-H2 comprising the amino acid sequence of SEQ ID NO: 54, and a CDR-H3 comprising the amino acid sequence of SEQ ID NO: 55; and/or a VL comprising a CDR-L1 comprising the amino acid sequence of SEQ ID NO: 56, a CDR-L2 comprising the amino acid sequence of SEQ ID NO: 57, and a CDR-L3 comprising the amino acid sequence of SEQ ID NO: 58. In some embodiments, the scFv2 comprises a VH comprising the amino acid sequence of SEQ ID NO: 59 and/or a VL comprising the amino acid sequence of SEQ ID NO: 60. In some embodiments, the first CH3 domain comprises E357K, S364K and S400C substitutions and the second CH3 domain comprises L351D, K370D, and N390C substitutions, or the first CH3 domain comprises L351D, K370D, and N390C substitutions and the second CH3 domain comprises E357K, S364K and S400C substitutions. In some embodiments, the multispecific antibody comprises an IgG1 Fc region, such as an IgG1 Fc having an N297A substitution.

[0277] In some embodiments, there is provided a trispecific antibody comprising: a first polypeptide comprising the amino acid sequence of SEQ ID NO: 118, a second polypeptide comprising the amino acid sequence of SEQ ID NO: 119, and a third polypeptide comprising the amino acid sequence of SEQ ID NO: 120. In some embodiments, there is provided a trispecific antibody comprising: a first polypeptide comprising the amino acid sequence of SEQ ID NO: 121, a second polypeptide comprising the amino acid sequence of SEQ ID NO: 122, and a third polypeptide comprising the amino acid sequence of SEQ ID NO: 123. In some embodiments, there is provided a trispecific antibody comprising: a first polypeptide comprising the amino acid sequence of SEQ ID NO: 124, a second polypeptide comprising the amino acid sequence of SEQ ID NO: 125, and a third polypeptide comprising the amino acid sequence of SEQ ID NO: 126.

[0278] In some embodiments, there is provided a bispecific T cell engager (BiTE) molecule targeting CD3 and a tumor antigen (e.g., HER2), comprising a first polypeptide, a second polypeptide and a third polypeptide, wherein:

[0279] (i) the first polypeptide comprises a structure represented by the formula:

VH-CH1-hinge-CH2-first CH3;

[0280] (ii) the second polypeptide comprises a structure represented by the formula:

scFv-hinge-CH2-second CH3; and

[0281] (iii) the third polypeptide comprises a structure represented by the formula:

VL-CL;

wherein:

[0282] VL is an immunoglobulin light chain variable domain;

[0283] VH is an immunoglobulin heavy chain variable domain;

[0284] scFv is a single-chain variable fragment;

[0285] CL is an immunoglobulin light chain constant domain:

[0286] CH1 is an immunoglobulin heavy chain constant domain 1;

[0287] CH2 is an immunoglobulin heavy chain constant domain 2; and

[0288] hinge is an immunoglobulin hinge region connecting the CH1 and CH2 domains:

wherein VL and VH associate to form an Fv that specifically binds to the tumor antigen (e.g., HER2); and wherein the scFv specifically binds to CD3. In some embodiments, the scFv comprises a VH comprising a CDR-H1 comprising the amino acid sequence of SEQ ID NO: 61, a CDR-H2 comprising the amino acid sequence of SEQ ID NO: 62, and a CDR-H3 comprising the amino acid sequence of SEQ ID NO: 63; and/or a VL comprising a CDR-L1 comprising the amino acid sequence of SEQ ID NO: 64, a CDR-L2 comprising the amino acid sequence of SEQ ID NO: 65, and a CDR-L3 comprising the amino acid sequence of SEQ ID NO: 66. In some embodiments, the scFv comprises a VH comprising the amino acid sequence of SEQ ID NO: 67, and/or a VL comprising the amino acid sequence of SEQ ID NO: 68. In some embodiments, the scFv comprises the amino acid sequence of SEQ ID NO: 79. In some embodiments, the Fv specifically binds to HER2. In some embodiments, the Fv comprises a VH comprising an CDR-H1 comprising the amino acid sequence of SEQ ID NO: 69, a CDR-H2 comprising the amino acid sequence of SEQ ID NO: 70, and a CDR-H3 comprising the amino acid sequence of SEQ ID NO: 71; and/or a VL comprising a CDR-L1 comprising the amino acid sequence of SEQ ID NO: 72, a CDR-L2 comprising the amino acid sequence of SEQ ID NO: 73, and a CDR-L3 comprising the amino acid sequence of SEQ ID NO: 74. In some embodiments, the Fv comprises a VH comprising the amino acid sequence of SEQ ID NO: 75 and/or a VL comprising the amino acid sequence of SEQ ID NO: 76. In some embodiments, the first CH3 domain comprises D356K, E357K, S364K and S400C substitutions and the second CH3 domain comprises L351D, K370D, N390C and K439D substitutions, or the first CH3 domain comprises L351D, K370D, N390C and K439D substitutions and the second CH3 domain comprises D356K, E357K, S364K and S400C substitutions. In some embodiments, the multispecific antibody comprises an IgG1 Fc region, such as an IgG1 Fc having an N297A substitution. In some embodiments, there is provided a bispecific T cell engager molecule comprising a first polypeptide comprising the amino acid sequence of SEQ ID NO: 112, a second polypeptide comprising the amino acid sequence of SEQ ID NO: 113, and a third polypeptide comprising the amino acid sequence of SEQ ID NO: 114.

### IV. ACTIVATABLE ANTIBODIES

[0289] Certain aspects of the present application relate to activatable antibodies (including activatable bispecific T cell engager molecules), activatable antigen binding fragments thereof, or derivatives of activatable antibodies.

[0290] In some embodiments, the activatable antibody comprises a polypeptide comprising a target-binding moiety (TBM), a cleavable moiety (CM), and a masking moiety (MM). In some embodiments, the TBM comprises an amino acid sequence that binds to a target such as CD3 or HER2. In some embodiments, the TBM comprises an antigen-binding domain (ABD) of an antibody or antibody fragment thereof. In some embodiments, the TBM comprises an antibody light chain variable region (VL) and an antibody heavy chain variable region (VH), wherein the VH and VL forms a binding domain that binds to the target in the absence of the MM. In some embodiments, the VH and VL are covalently linked, e.g., in a scFv. In some embodiments, the VH and VL form an Fv fragment. In some embodiments, the VH is linked to an antibody heavy chain constant region, and the VL is linked to an antibody light chain constant region. In some embodiments, the activatable antibody comprises an Fc region comprising any one or combination of the engineered disulfide bonds or salt bridges described herein. In some embodiments, the activatable antibody comprises an Fc region that does not comprise any one or combination of the engineered disulfide bonds or salt bridges described herein.

[0291] In some embodiments, the activatable antibody comprises a polypeptide comprising the structure, from N-terminus to C-terminus, of: masking moiety (MM)-cleavable moiety (CM)-VL, and the activatable antibody further comprises a second polypeptide comprising a VH (e.g., a Fab fragment). In some embodiments, the activatable antibody comprises a polypeptide comprising the structure, from N-terminus to C-terminus, of: masking moiety (MM)-cleavable moiety (CM)-VL-VH (e.g., a scFv). In some embodiments, the activatable antibody comprises a polypeptide comprising the structure, from N-terminus to C-terminus, of: masking moiety (MM)-cleavable moiety (CM)-VH, and the activatable antibody further comprises a second polypeptide comprising a VL (e.g., a Fab fragment). In some embodiments, the activatable antibody comprises a polypeptide comprising the structure, from N-terminus to C-terminus, of: masking moiety (MM)-cleavable moiety (CM)-VH-VL (e.g., a scFv).

[0292] In some embodiments, the activatable antibody comprises a polypeptide comprising the structure, from N-terminus to C-terminus, of: masking moiety (MM)-L1-cleavable moiety (CM)-L2-VL, and the activatable antibody further comprises a second polypeptide comprising a VH (e.g., a Fab fragment). In some embodiments, the activatable antibody comprises a polypeptide comprising the structure, from N-terminus to C-terminus, of: masking moiety (MM)-L1-cleavable moiety (CM)-L2-VL-L3-VH (e.g., a scFv). In some embodiments, the activatable antibody comprises a polypeptide comprising the structure, from N-terminus to C-terminus, of masking moiety (MM)-cleavable moiety (CM)-L1-VH, and the activatable antibody further comprises a second polypeptide comprising a VL (e.g., a Fab fragment). In some embodiments, the activatable antibody comprises a polypeptide comprising the structure, from N-terminus to C-terminus, of: masking moiety (MM)-L1-cleavable moiety (CM)-L2-VH-L3-VL (e.g., a scFv). In some embodiments, L1, L2, and/or L3 are linkers. In some embodiments, each of L1, L2, and L3 is a linker that can independently be either a bond or a peptide linker having an independently selected length of 1 or more, 2 or more, 3 or more, 4 or more, 5 or more, 6 or more, 7 or more, 8 or more, 9 or more, or 10 or more amino acids.

[0293] In some embodiments, there is provided an activatable antibody comprising a first polypeptide comprising a first CH3 domain, a second polypeptide comprising a second CH3 domain, and a third polypeptide, wherein:

[0294] (i) the first polypeptide comprises a structure represented by the formula:

VH-CH1-hinge-CH2-first CH3;

[0295] (ii) the second polypeptide comprises a structure represented by the formula:

MM1-CM1-scFv-hinge-CH2-second CH3; and

[0296] (iii) the third polypeptide comprises a structure represented by the formula:

MM2-CM2-VL-CL;

wherein:

[0297] VL is an immunoglobulin light chain variable domain;

[0298] VH is an immunoglobulin heavy chain variable domain;

[0299] scFv is a single-chain variable fragment:

[0300] CL is an immunoglobulin light chain constant domain;

[0301] CH1 is an immunoglobulin heavy chain constant domain 1;

[0302] CH2 is an immunoglobulin heavy chain constant domain 2;
[0303] hinge is an immunoglobulin hinge region connecting the CH1 and CH2 domains;
[0304] MM1 is a first masking peptide;
[0305] MM2 is a second masking peptide;
[0306] CM1 is a first cleavable peptide; and
[0307] CM2 is a second cleavable peptide;
   wherein VL and VH associate to form a first Fv that specifically binds to a first target; wherein the scFv specifically binds to a second target; wherein MM1 inhibits the binding of the scFv to the first target when CM1 is not cleaved; and wherein MM2 inhibits the binding of the first Fv to the second target when CM2 is not cleaved. In some embodiments, the first CH3 domain and the second CH3 domain do not comprise any one or combination of the engineered disulfide bonds or salt bridges described herein. In some embodiments, the first CH3 domain and the second CH3 domain comprise any one or combination of the engineered disulfide bonds or salt bridges described herein. In some embodiments, the first CH3 domain comprises N390C substitution and the second CH3 domain comprises S400C substitution, or the first CH3 domain comprises S400C substitution and the second CH3 domain comprises N390C substitution. In some embodiments, the first CH3 domain comprises E357K, S364K and S400C substitutions and the second CH3 domain comprises L351D, K370D, and N390C substitutions, or the first CH3 domain comprises L351D, K370D, and N390C substitutions and the second CH3 domain comprises E357K, S364K and S400C substitutions. In some embodiments, the first CH3 domain comprises D356K, E357K, S364K and N390C substitutions and the second CH3 domain comprises L351D, K370D, K439D and S400C substitutions, or the first CH3 domain comprises L351D, K370D, K439D and S400C substitutions and the second CH3 domain comprises D356K, E357K, S364K and N390C substitutions. In some embodiments, the first CH3 domain comprises D356K, E357K, S364K and S400C substitutions and the second CH3 domain comprises L351D, K370D, N390C and K439D substitutions, or the first CH3 domain comprises L351D, K370D, N390C and K439D substitutions and the second CH3 domain comprises D356K, E357K, S364K and S400C substitutions. In some embodiments, the activatable antibody comprises an IgG1 Fc region, such as an IgG1 Fc having an N297A substitution. In some embodiments, the first target is a tumor antigen (e.g., HER2) and the second target is CD3 (e.g., CD3e). In some embodiments, the first target is CD3 (e.g., CD3e) and the second target is a tumor antigen (e.g., HER2).

[0308] In some embodiments, there is provided an activatable antibody comprising a first polypeptide comprising a first CH3 domain, a second polypeptide comprising a second CH3 domain, and a third polypeptide, wherein:

[0309] (i) the first polypeptide comprises a structure represented by the formula:

MM1-CM1-VH-CH1-hinge-CH2-first CH3;

[0310] (ii) the second polypeptide comprises a structure represented by the formula:

MM2-CM2-scFv-hinge-CH2-second CH3; and

[0311] (iii) the third polypeptide comprises a structure represented by the formula:

VL-CL;

wherein:

[0312] VL is an immunoglobulin light chain variable domain;

[0313] VH is an immunoglobulin heavy chain variable domain;

[0314] scFv is a single-chain variable fragment;

[0315] CL is an immunoglobulin light chain constant domain;

[0316] CH1 is an immunoglobulin heavy chain constant domain 1;

[0317] CH2 is an immunoglobulin heavy chain constant domain 2;
[0318] hinge is an immunoglobulin hinge region connecting the CH1 and CH2 domains:
[0319] MM1 is a first masking peptide;
[0320] MM2 is a second masking peptide;
[0321] CM1 is a first cleavable peptide; and
[0322] CM2 is a second cleavable peptide;
   wherein VL and VH associate to form a first Fv that specifically binds to a first target; wherein the scFv specifically binds to a second target; wherein MM1 inhibits the binding of the first Fv to the first target when CM1 is not cleaved; and wherein MM2 inhibits the binding of the scFv to the second target when CM2 is not cleaved. In some embodiments, the first CH3 domain and the second CH3 domain do not comprise any one or combination of the engineered disulfide bonds or salt bridges described herein. In some embodiments, the first CH3 domain and the second CH3 domain comprise any one or combination of the engineered disulfide bonds or salt bridges described herein. In some embodiments, the first CH3 domain comprises N390C substitution and the second CH3 domain comprises S400C substitution, or the first CH3 domain comprises S400C substitution and the second CH3 domain comprises N390C substitution. In some embodiments, the first CH3 domain comprises E357K, S364K and S400C substitutions and the second CH3 domain comprises L351D, K370D, and N390C substitutions, or the first CH3 domain comprises L351D, K370D, and N390C substitutions and the second CH3 domain comprises E357K, S364K and S400C substitutions. In some embodiments, the first CH3 domain comprises D356K, E357K, S364K and N390C substitutions and the second CH3 domain comprises L351D, K370D, K439D and S400C substitutions, or the first CH3 domain comprises L351D, K370D, K439D and S400C substitutions and the second CH3 domain comprises D356K, E357K, S364K and N390C substitutions. In some embodiments, the first CH3 domain comprises D356K, E357K, S364K and S400C substitutions and the second CH3 domain comprises L351D, K370D, N390C and K439D substitutions, or the first CH3 domain comprises L351D, K370D. N390C and K439D substitutions and the second CH3 domain comprises D356K, E357K, S364K and S400C substitutions. In some embodiments, the activatable antibody comprises an IgG1 Fc region, such as an IgG1 Fc having an N297A substitution. In some embodiments, the first target is a tumor antigen (e.g., HER2) and the second target is CD3 (e.g., CD3e). In some embodiments, the first target is CD3 (e.g., CD3e) and the second target is a tumor antigen (e.g., HER2).

[0323] In some embodiments, there is provided an activatable antibody comprising a first polypeptide comprising a first CH3 domain, a second polypeptide comprising a second CH3 domain, a third polypeptide, and a fourth polypeptide, wherein:

[0324] (i) the first polypeptide comprises a structure represented by the formula:

MM1-CM1-VH1-CH1-hinge-CH2-first CH3;

[0325] (ii) the second polypeptide comprises a structure represented by the formula:

MM2-CM2-VH2-CH1-hinge-CH2-second CH3;

[0326] (iii) the third polypeptide comprises a structure represented by the formula:

VL1-CL; and

[0327] (iv) the fourth polypeptide comprises a structure represented by the formula:

VL2-CL;

wherein:

[0328] VL1 is a first immunoglobulin light chain variable domain;

[0329] VH1 is a first immunoglobulin heavy chain variable domain;

[0330] VL2 is a second immunoglobulin light chain variable domain;

[0331] VH2 is a second immunoglobulin heavy chain variable domain;

[0332] CL is an immunoglobulin light chain constant domain;

[0333] CH1 is an immunoglobulin heavy chain constant domain 1;

[0334] CH2 is an immunoglobulin heavy chain constant domain 2;
[0335] hinge is an immunoglobulin hinge region connecting the CH1 and CH2 domains;
[0336] MM1 is a first masking peptide;
[0337] MM2 is a second masking peptide;
[0338] CM1 is a first cleavable peptide; and
[0339] CM2 is a second cleavable peptide;
   wherein VL1 and VH1 associate to form a first Fv that specifically binds to a first target; wherein VL2 and VH2 associate to form a second Fv that specifically binds to a second target; wherein MM1 inhibits the binding of the first Fv to the first target when CM1 is not cleaved; and wherein MM2 inhibits the binding of the second Fv to the second target when CM2 is not cleaved. In some embodiments, the first CH3 domain and the second CH3 domain do not comprise any one or combination of the engineered disulfide bonds or salt bridges described herein. In some embodiments, the first CH3 domain and the second CH3 domain comprise any one or combination of the engineered disulfide bonds or salt bridges described herein. In some embodiments, the first CH3 domain comprises N390C substitution and the second CH3 domain comprises S400C substitution, or the first CH3 domain comprises S400C substitution and the second CH3 domain comprises N390C substitution. In some embodiments, the first CH3 domain comprises E357K, S364K and S400C substitutions and the second CH3 domain comprises L351D, K370D, and N390C substitutions, or the first CH3 domain comprises L351D, K370D, and N390C substitutions and the second CH3 domain comprises E357K, S364K and S400C substitutions. In some embodiments, the first CH3 domain comprises D356K, E357K, S364K and N390C substitutions and the second CH3 domain comprises L351D, K370D, K439D and S400C substitutions, or the first CH3 domain comprises L351D, K370D, K439D and S400C substitutions and the second CH3 domain comprises D356K, E357K, S364K and N390C substitutions. In some embodiments, the first CH3 domain comprises D356K, E357K, S364K and S400C substitutions and the second CH3 domain comprises L351D, K370D, N390C and K439D substitutions, or the first CH3 domain comprises L351D, K370D, N390C and K439D substitutions and the second CH3 domain comprises D356K, E357K, S364K and S400C substitutions. In some embodiments, the activatable antibody comprises an IgG1 Fc region, such as an IgG1 Fc having an N297A substitution. In some embodiments, the first target is a tumor antigen (e.g., HER2) and the second target is CD3 (e.g., CD3e). In some embodiments, the first target is CD3 (e.g., CD3e) and the second target is a tumor antigen (e.g., HER2).

[0340] In some embodiments, there is provided an activatable antibody comprising a first polypeptide comprising a first CH3 domain, a second polypeptide comprising a second CH3 domain, a third polypeptide, and a fourth polypeptide, wherein:

[0341] (i) the first polypeptide comprises a structure represented by the formula:

MM1-CM1-VH1-CH1-hinge-CH2-first CH3;

[0342] (ii) the second polypeptide comprises a structure represented by the formula:

VH2-CH1-hinge-CH2-second CH3;

[0343] (iii) the third polypeptide comprises a structure represented by the formula:

VL1-CL; and

[0344] (iv) the fourth polypeptide comprises a structure represented by the formula:

MM2-CM2-VL2-CL;

wherein:

[0345] VL1 is a first immunoglobulin light chain variable domain;

[0346] VH1 is a first immunoglobulin heavy chain variable domain;

[0347] VL2 is a second immunoglobulin light chain variable domain;

[0348] VH2 is a second immunoglobulin heavy chain variable domain;

[0349] CL is an immunoglobulin light chain constant domain;

[0350] CH1 is an immunoglobulin heavy chain constant domain 1;

[0351] CH2 is an immunoglobulin heavy chain constant domain 2;
[0352] hinge is an immunoglobulin hinge region connecting the CH1 and CH2 domains;
[0353] MM1 is a first masking peptide;
[0354] MM2 is a second masking peptide;
[0355] CM1 is a first cleavable peptide; and
[0356] CM2 is a second cleavable peptide;
   wherein VL1 and VH1 associate to form a first Fv that specifically binds to a first target; wherein VL2 and VH2 associate to form a second Fv that specifically binds to a second target; wherein MM1 inhibits the binding of the first Fv to the first target when CM1 is not cleaved; and wherein MM2 inhibits the binding of the second Fv to the second target when CM2 is not cleaved. In some embodiments, the first CH3 domain and the second CH3 domain do not comprise any one or combination of the engineered disulfide bonds or salt bridges described herein. In some embodiments, the first CH3 domain and the second CH3 domain comprise any one or combination of the engineered disulfide bonds or salt bridges described herein. In some embodiments, the first CH3 domain comprises N390C substitution and the second CH3 domain comprises S400C substitution, or the first CH3 domain comprises S400C substitution and the second CH3 domain comprises N390C substitution. In some embodiments, the first CH3 domain comprises E357K, S364K and S400C substitutions and the second CH3 domain comprises L351D, K370D, and N390C substitutions, or the first CH3 domain comprises L351D, K370D, and N390C substitutions and the second CH3 domain comprises E357K, S364K and S400C substitutions. In some embodiments, the first CH3 domain comprises D356K, E357K, S364K and N390C substitutions and the second CH3 domain comprises L351D, K370D, K439D and S400C substitutions, or the first CH3 domain comprises L351D, K370D, K439D and S400C substitutions and the second CH3 domain comprises D356K, E357K, S364K and N390C substitutions. In some embodiments, the first CH3 domain comprises D356K, E357K, S364K and S400C substitutions and the second CH3 domain comprises L351D, K370D, N390C and K439D substitutions, or the first CH3 domain comprises L351D. K370D, N390C and K439D substitutions and the second CH3 domain comprises D356K, E357K, S364K and S400C substitutions. In some embodiments, the activatable antibody comprises an IgG1 Fc region, such as an IgG1 Fc having an N297A substitution. In some embodiments, the first target is a tumor antigen (e.g., HER2) and the second target is CD3 (e.g., CD3e). In some embodiments, the first target is CD3 (e.g., CD3e) and the second target is a tumor antigen (e.g., HER2).

[0357] In some embodiments, there is provided an activatable antibody comprising a first polypeptide comprising a first CH3 domain, a second polypeptide comprising a second CH3 domain, a third polypeptide, and a fourth polypeptide, wherein:

[0358] (i) the first polypeptide comprises a structure represented by the formula:

VH1-CH1-hinge-CH2-first CH3;

[0359] (ii) the second polypeptide comprises a structure represented by the formula:

VH2-CH1-hinge-CH2-second CH3:

[0360] (iii) the third polypeptide comprises a structure represented by the formula:

MM1-CM1-VL1-CL; and

[0361] (iv) the fourth polypeptide comprises a structure represented by the formula:

MM2-CM2-VL2-CL;

wherein:

[0362] VL1 is a first immunoglobulin light chain variable domain;

[0363] VH1 is a first immunoglobulin heavy chain variable domain;

[0364] VL2 is a second immunoglobulin light chain variable domain;

[0365] VH2 is a second immunoglobulin heavy chain variable domain;

[0366] CL is an immunoglobulin light chain constant domain;

[0367] CH1 is an immunoglobulin heavy chain constant domain 1;

[0368] CH2 is an immunoglobulin heavy chain constant domain 2;
[0369] hinge is an immunoglobulin hinge region connecting the CH1 and CH2 domains;
[0370] MM1 is a first masking peptide;
[0371] MM2 is a second masking peptide;
[0372] CM1 is a first cleavable peptide; and
[0373] CM2 is a second cleavable peptide;
   wherein VL I and VH1 associate to form a first Fv that specifically binds to a first target; wherein VL2 and VH2 associate to form a second Fv that specifically binds to a second target; wherein MM1 inhibits the binding of the first Fv to the first target when CM1 is not cleaved; and wherein MM2 inhibits the binding of the second Fv to the second target when CM2 is not cleaved. In some embodiments, the first CH3 domain and the second CH3 domain do not comprise any one or combination of the engineered disulfide bonds or salt bridges described herein. In some embodiments, the first CH3 domain and the second CH3 domain comprise any one or combination of the engineered disulfide bonds or salt bridges described herein. In some embodiments, the first CH3 domain comprises N390C substitution and the second CH3 domain comprises S400C substitution, or the first CH3 domain comprises S400C substitution and the second CH3 domain comprises N390C substitution. In some embodiments, the first CH3 domain comprises E357K, S364K and S400C substitutions and the second CH3 domain comprises L351D, K370D, and N390C substitutions, or the first CH3 domain comprises L351D, K370D, and N390C substitutions and the second CH3 domain comprises E357K, S364K and S400C substitutions. In some embodiments, the first CH3 domain comprises D356K, E357K, S364K and N390C substitutions and the second CH3 domain comprises L351D, K370D, K439D and S400C substitutions, or the first CH3 domain comprises L351D, K370D, K439D and S400C substitutions and the second CH3 domain comprises D356K, E357K, S364K and N390C substitutions. In some embodiments, the first CH3 domain comprises D356K, E357K, S364K and S400C substitutions and the second CH3 domain comprises L351D, K370D, N390C and K439D substitutions, or the first CH3 domain comprises L351D. K370D, N390C and K439D substitutions and the second CH3 domain comprises D356K, E357K, S364K and S400C substitutions. In some embodiments, the activatable antibody comprises an IgG1 Fc region, such as an IgG1 Fc having an N297A substitution. In some embodiments, the first target is a tumor antigen (e.g., HER2) and the second target is CD3 (e.g., CD3e). In some embodiments, the first target is CD3 (e.g., CD3e) and the second target is a tumor antigen (e.g., HER2).

[0374] In some embodiments, the activatable antibody is designed based on any one of the multispecific antibodies described herein, e.g., by fusing a masking moiety (MM) to a target-binding moiety (TBM) in the multispecific antibody via a cleavable moiety (CM), wherein the MM inhibits binding of the TBM to its target when the CM is not cleaved. Activatable antibodies have been described, for example, in WO2019/149282, the contents of which are incorporated herein by reference in its entirety. The activatable antibody may comprise any one of the TBMs described in the subsection “Target binding moiety (TBM)” of section III “Multispecific antibodies.” The activatable antibodies described herein may comprise one or more linkers described in the subsection “Linker” of section III “Multispecific antibodies”, e.g., disposed between MM and CM, CM and TBM, or TBM and hinge region of an Fc.

[0375] The MM refers to an amino acid sequence that, when the CM of the activatable antibody is intact (e.g., uncleaved by a corresponding enzyme, and/or containing an unreduced cysteine-cysteine disulfide bond), the MM interferes with or inhibits binding of the TBM to its target. In some embodiments, the MM interferes with or inhibits binding of the TBM to its target so efficiently that binding of the TBM to its target is extremely low and/or below the limit of detection (e.g., binding cannot be detected in an ELISA or flow cytometry assay). The amino acid sequence of the CM may overlap with or be included within the MM. It should be noted that for sake of convenience “ABP” or “activatable antibody” are used herein to refer to an ABP or activatable antibody in both their uncleaved (or “native”) state, as well as in their cleaved state. It will be apparent to the ordinarily skilled artisan that in some embodiments a cleaved ABP may lack an MM due to cleavage of the CM, e.g., by a protease, resulting in release of at least the MM (e.g., where the MM is not joined to the ABP by a covalent bond (e.g., a disulfide bond between cysteine residues)). Exemplary ABPs are described in more detail below.

[0376] The CM generally includes an amino acid sequence that is cleavable, for example, serves as the substrate for an enzyme and/or a cysteine-cysteine pair capable of forming a reducible disulfide bond. As such, when the terms “cleavage,” “cleavable,” “cleaved” and the like are used in connection with a CM, the terms encompass enzymatic cleavage, e.g., by a protease, as well as disruption of a disulfide bond between a cysteine-cysteine pair via reduction of the disulfide bond that can result from exposure to a reducing agent.

[0377] In some embodiments, the activatable antibodies do not induce ADCC effects. Methods of measuring ADCC effects are known in the art. In some embodiments, the activatable antibodies (when in active form or inactive form) do not ADCC effects by more than about 10% (do not induce ADCC by more than about 10%, more than about 5%, more than about 1%, more than about 0.1%, more than about 0.01%) relative to a control.

[0378] In some embodiments, the activatable antibodies (e.g., BiTE molecules) are capable of inhibiting tumor cell growth and/or proliferation. In some embodiments, the tumor cell growth and/or proliferation is inhibited by at least about 5% (e.g., at least about 5%, at least about 10%, at least about 20%, at least about 30%, at least about 40%, at least about 50%, at least about 60%, at least about 70%, at least about 80%, at least about 90%, or at least about 99%) when contacted with the activatable antibodies and T cells relative to corresponding tumor cells not contacted with the activatable antibodies (or relative to corresponding tumor cells contacted with an isotype control antibody and T cells). In some embodiments, the activatable antibodies are capable of reducing tumor volume in a subject when the subject is administered the activatable antibodies. In some embodiments, the activatable antibodies (e.g., BiTE molecules) are capable of reducing tumor volume in a subject by at least about 5% (e.g., at least about 5%, at least about 10%, at least about 20%, at least about 30%, at least about 40%, at least about 50%, at least about 60%, at least about 70%, at least about 80%, at least about 90%, or at least about 99%) relative to the initial tumor volume in the subject (e.g., prior to administration of the activatable antibodies; as compared to a corresponding tumor in a subject administered an isotype control antibody). Methods of monitoring tumor cell growth/proliferation, tumor volume, and/or tumor inhibition are known in the art.

[0379] In some embodiments, the activatable antibodies have therapeutic effect on a cancer. In some embodiments, the activatable antibodies reduce one or more signs or symptoms of a cancer. In some embodiments, a subject suffering from a cancer goes into partial or complete remission when administered the activatable antibodies.

### Masking Moiety (MM)

[0380] The activatable antibodies described herein comprise one, two or more masking moieties. Sequences of exemplary masking moieties are shown in Table D below. Masking moieties can be isolated from phage display libraries, for example, as described in WO2019/149282, which is incorporated herein by reference in its entirety.

[0381] In some embodiments, the activatable antibody comprises a MM comprising the amino acid sequence of SEQ ID NO: 35. In some embodiments, the activatable antibody comprises a MM comprising the amino acid sequence of SEQ ID NO: 36. In some embodiments, the activatable antibody comprises a first MM comprising the amino acid sequence of SEQ ID NO: 35, and a second MM comprising the amino acid sequence of SEQ ID NO: 36.

TABLE D
Masking Moieties.

| | Masking | Sequence |
|---|---|---|
| SEQ ID NQ | moiety | |
| 35 | CD3 MM | EVGSYPYDDPDCPSHDSDCDN |
| 36 | HER2 MM | ESDACDADPFDCQAGGGGSGSGGS |

[0382] In some embodiments, the masking peptide (MM) interferes with, obstructs, reduces the ability of, prevents, inhibits, or competes with the corresponding target binding moiety for binding to its target (e.g., an “inactive activatable antibody). In some embodiments, the masking peptide (MM) interferes with, obstructs, reduces, prevents, inhibits, or competes with the target binding moiety for binding to its target only when the antibody has not been activated (e.g., activated by a change in pH (increased or decreased), activated by a temperature shift (increased or decreased), activated after being contacted with a second molecule (such as a small molecule or a protein ligand), etc.). In some embodiments, activation induces cleavage of the cleavable moiety. In some embodiments, activation induces conformation changes in the polypeptide(s) (e.g., displacement of the MM), leading to the MM no longer preventing the activatable antibody from binding to its target. In some embodiments, the MM interferes with, obstructs, reduces the ability of, prevents, inhibits, or competes with the target binding moiety for binding to its target only when the cleavable moiety (CM) has not been cleaved by one or more proteases that cleave within the cleavable moiety (CM). In some embodiments, the MM has a masking efficiency of at least about 2.0 (e.g., at least about 2.0, at least about 3.0, at least about 4.0, at least about 5.0, at least about 6.0, at least about 7.0, at least about 8.0, at least about 9.0, at least about 10, at least about 25, at least about 50, at least about 75, at least about 100, at least about 150, at least about 200, at least about 300, at least about 400, at least about 500, etc.) prior to activation. In some embodiments, masking efficiency is measured as the difference in affinity of an activatable antibody comprising the MM for binding its target (before activation) relative to the affinity of a polypeptide lacking the MM for binding its target (e.g., the difference in affinity for a target antigen (such as CD3 or HER2) of an activatable antibody comprising a MM (before activation) relative to a parental antibody lacking the MM, or the difference in affinity for a target antigen (such as CD3 or HER2) of an activatable antibody comprising a MM (before activation) relative to the affinity for the target antigen of the activatable antibody after activation). In some embodiments, the masking efficiency is measured by dividing the EC50 for binding of an activatable antibody comprising a MM (before activation) by the EC50 of the parental antibody (e.g., by measuring EC50 by ELISA). In some embodiments, masking efficiency is measured as the difference in affinity of an activatable antibody comprising the MM for binding its target before activation relative to the affinity of the activatable antibody comprising the MM for binding its target after activation (e.g., the difference in affinity for a target antigen (such as CD3 or HER2) of an activatable antibody before activation relative to the activatable antibody after activation). In some embodiments, the MM binds to the target binding moiety (TBM), and prevents the activatable antibody from binding to its target (e.g., an “inactive” activatable antibody). In some embodiments, the MM has a dissociation constant for binding to the target binding moiety (TBM) that is greater than the dissociation constant of the target binding moiety (TBM) for its target. Dissociation constants can be measured, e.g., by techniques such as ELISA, surface plasmon resonance or Bio-Layer Interferometry (BLI), or flow cytometry.

[0383] In some embodiments, the MM does not interfere with, obstruct, reduce the ability of, prevent, inhibit, or compete with the target binding moiety (TBM) for binding to its target after the polypeptide has been activated (e.g., activated by treatment with one or more proteases that cleave within the cleavable moiety (CM), activated by a change in pH (increased or decreased), activated by a temperature shift (increased or decreased), activated after being contacted with a second molecule (such as an enzyme), etc.). In some embodiments, the MM does not interfere with, obstruct, reduce the ability of, prevent, inhibit, or compete with the target binding moiety (TBM) for binding to its target after the cleavable moiety (CM) has been cleaved by one or more proteases that cleave within the cleavable moiety (CM). In some embodiments, the MM has a masking efficiency of at most about 1.75 (e.g., at most about 1.75, at most about 1.5, at most about 1.4, at most about 1.3, at most about 1.2, at most about 1.1, at most about 1.0, at most about 0.9, at most about 0.8, at most about 0.7, at most about 0.6, or at most about 0.5, etc.) after activation (e.g., the relative affinity of the activatable antibody after activation as compared to the affinity of a parental antibody).

[0384] In some embodiments, any of the MMs described herein may further comprise one or more additional amino acid sequences (e.g., one or more polypeptide tags). Examples of suitable additional amino acid sequence may include, without limitation, purification tags (such as his-tags, flag-tags, maltose binding protein and glutathione-S-transferase tags), detection tags (such as tags that may be detected photometrically (e.g., red or green fluorescent protein, etc.)), tags that have a detectable enzymatic activity (e.g., alkaline phosphatase, etc.), tags containing secretory sequences, leader sequences, and/or stabilizing sequences, protease cleavage sites (e.g., furin cleavage sites, TEV cleavage sites, Thrombin cleavage sites), and the like. In some embodiments, the one or more additional amino acid sequences are at the N-terminus of the MM.

### Cleavable Moiety (CM)

[0385] In some embodiments, the activatable antibody comprises one or more CMs, each of which is disposed between a MM and a TBM.

[0386] In some embodiments, the CM comprises at least a first cleavage site (CS1) (e.g., a first protease cleavage site). In some embodiments, the first cleavage site is a first protease cleavage site. Any suitable protease cleavage site recognized and/or cleaved by any protease (e.g., a protease that is known to be co-localized with a target of a polypeptide comprising the CM) known in the art may be used, including, for example, a protease cleavage site recognized and/or cleaved by urokinase-type plasminogen activator (uPA): matrix metalloproteinases (e.g., MMP-1, MMP-2, MMP-3, MMP-7, MMP-8, MMP-9, MMP-10, MMP-11, MMP-12, MMP-13, MMP-14, MMP-15, MMP-16, MMP-17, MMP-19, MMP-20, MMP-23, MMP-24, MMP-26, and/or MMP-27); Tobacco Etch Virus (TEV) protease; plasmin; Thrombin; PSA; PSMA; ADAMS/ADAMTS (e.g., ADAM 8, ADAM 9, ADAMIO, ADAM12, ADAMIS, ADAM17/TACE, ADAMDECI, ADAMTSI, ADAMTS4, and/or ADAMTS5); caspases (e.g., Caspase-1, Caspase-2, Caspase-3, Caspase-4, Caspase-5, Caspase-6, Caspase-7, Caspase-8, Caspase-9, Caspase-10, Caspase-11, Caspase-12, Caspase-13, and/or Caspase-14): aspartate proteases (e.g., RACE and/or Renin); aspartic cathepsins (e.g., Cathepsin D and/or Cathepsin E); cysteine cathepsins (e.g., Cathepsin B, Cathepsin C, Cathepsin K, Cathepsin L, Cathepsin S, Cathepsin V/L2, and/or Cathepsin X/Z/P); cysteine proteinases (e.g., Cruzipain, Legumain, and/or Otubain-2); KLKs (e.g., KLK4, KLK5, KLK6, KLK7, KLK8, KLK10, KLK11, KLK13, and/or KLK14); metallo proteainases (e.g., Meprin, Neprilysin, PSMA, and/or BMP-1); serine proteases (e.g., activated protein C, Cathepsin A, Cathepsin G, Chymase, and/or coagulation factor proteases (such as FVIIa, FIXa, FXa, FXla, FXIIa)); elastase: granzyme B; guanidinobenzoatase; HtrAl; human neutrophil elastase; lactoferrin; marapsin; NS3/4A; PACE4; tPA; tryptase: type 11 transmembrane serine proteases (TTSPs) (e.g., DESC1, DPP-4, FAP, Hepsin, Matriptase-2, MT-SP1/Matriptase, TMPRSS2, TMPRSS3 and/or TMPRSS4); etc. In some embodiments, the first protease cleavage site is a cleavage site for a protease selected from uPA, MMP-1, MMP-2, MMP-3, MMP-8, MMP-9, MMP-14, TEV protease, plasmin, Thrombin, Factor X, PSA, PSMA, Cathepsin D, Cathepsin K, Cathepsin S, ADAM10, ADAM12, ADAMTS, Caspase-1, Caspase-2, Caspase-3, Caspase-4, Caspase-5, Caspase-6, Caspase-7, Caspase-8, Caspase-9, Caspase-10, Caspase-11, Caspase-12, Caspase-13, Caspase-14, and TACE. In some embodiments, the first protease cleavage site is a cleavage site for a protease selected from uPA, MMP-2, MMP-9, and/or TEV protease. In some embodiments, the protease cleavage comprises an amino acid sequence selected from SGRSA (SEQ ID NO: 127), PLGLAG (SEQ ID NO: 128), and ENLYFQG (SEQ ID NO: 129).

[0387] In some embodiments, the cleavable moiety (CM) further comprises at least a second cleavage site (e.g., at least a second, at least a third, at least a fourth, at least a fifth, etc.). In some embodiments, the cleavable moiety (CM) further comprises a second cleavage site (CS2). In some embodiments, the second cleavage site is a second protease cleavage site. The second protease cleavage site may be any suitable protease cleavage site recognized and/or cleaved by any of the proteases described above. In some embodiments, the first (CS1) and second (CS2) cleavage sites are protease cleavage sites recognized and/or cleaved by the same protease. In some embodiments, the first (CS1) and second (CS2) cleavage sites are protease cleavage sites recognized and/or cleaved by different proteases (e.g., the first protease cleavage site is recognized and/or cleaved by uPA, and the second protease cleavage site is recognized and/or cleaved by MMP-2; the first protease cleavage site is recognized and/or cleaved by uPA, and the second protease cleavage site is recognized and/or cleaved by MMP-9; the first protease cleavage site is recognized and/or cleaved by uPA, and the second protease cleavage site is recognized and/or cleaved by TEV protease: etc.). In some embodiments, the at least second cleavage site (CS2) is C-terminal to the first linker (L1). In some embodiments, the cleavable moiety (CM) comprises a structure, from N-terminus to C-terminus, of; (CS1)-L1-(CS2).

[0388] In some embodiments, the cleavable moiety (CM) further comprises at least a second linker (e.g., at least a second, at least a third, at least a fourth, at least a fifth, etc.). In some embodiments, the cleavable moiety (CM) further comprises a second linker (L2). The second linker (L2) may be any suitable linker described above. In some embodiments, the first (L1) and second (L2) linkers are the same. In some embodiments, the first (L1) and second (L2) linkers are different. In some embodiments, the at least second linker (L2) is C-terminal to the second cleavage site (CS2). In some embodiments, the cleavable moiety (CM) comprises a structure, from N-terminus to C-terminus, of (CS1)-L1-(CS2)-L2.

### Activatable Antibodies Targeting CD3

[0389] The present application provides activatable antibodies, activatable antibody fragments, and polypeptides that target CD3, comprising a masking moiety (MM) comprising the amino acid sequence of SEQ ID NO: 35.

[0390] In some embodiments, there is provided an antibody light chain comprising a polypeptide comprising, from N-terminus to C-terminus, a MM, a cleavable moiety (CM), and a target binding moiety (TBM), wherein the MM comprises the amino acid sequence of SEQ ID NO: 35; wherein the CM comprises at least a first cleavage site; and wherein the TBM comprises a VL of an anti-CD3 antibody. In some embodiments, the anti-CD3 antibody comprises a VL comprising a CDR-L1 comprising the amino acid sequence of SEQ ID NO: 64, a CDR-L2 comprising the amino acid sequence of SEQ ID NO: 65, and a CDR-L3 comprising the amino acid sequence of SEQ ID NO: 66.

[0391] In some embodiments, there is provided an antibody heavy chain comprising a polypeptide comprising, from N-terminus to C-terminus, a MM, a CM, and a TBM, wherein the MM comprises the amino acid sequence of SEQ ID NO: 35; wherein the CM comprises at least a first cleavage site; and wherein the TBM comprises a VH of an anti-CD3 antibody. In some embodiments, the anti-CD3 antibody comprises a VH comprising a CDR-H1 comprising the amino acid sequence of SEQ ID NO: 61, a CDR-H2 comprising the amino acid sequence of SEQ ID NO: 62.

[0392] In some embodiments, there is provided an activatable antibody targeting CD3 comprising a first polypeptide comprising, from N-terminus to C-terminus, a MM, a CM, and a TBM, wherein the MM comprises the amino acid sequence of SEQ ID NO: 35, wherein the MM inhibits binding of the activatable antibody to CD3 when the CM is not cleaved; wherein the CM comprises at least a first cleavage site; wherein the TBM comprises a VL, and the activatable antibody further comprises a second polypeptide comprising a VH; and wherein the activatable antibody binds to CD3 via the VH and VL when the CM is cleaved. In some embodiments, the activatable antibody comprises a VH comprises a CDR-H1 comprising the amino acid sequence of SEQ ID NO: 61, a CDR-H2 comprising the amino acid sequence of SEQ ID NO: 62, and a CDR-H3 comprising the amino acid sequence of SEQ ID NO: 63; and/or a VL comprising a CDR-L1 comprising the amino acid sequence of SEQ ID NO: 64, a CDR-L2 comprising the amino acid sequence of SEQ ID NO: 65, and a CDR-L3 comprising the amino acid sequence of SEQ ID NO: 66. In some embodiments, the activatable antibody comprises a VH comprising the amino acid sequence of SEQ ID NO: 67, and/or a VL comprising the amino acid sequence of SEQ ID NO: 68.

[0393] In some embodiments, there is provided an activatable antibody targeting CD3 comprising a first polypeptide comprising, from N-terminus to C-terminus, a MM, a CM, and a TBM, wherein the MM comprises the amino acid sequence of SEQ ID NO: 35, wherein the MM inhibits binding of the activatable antibody to CD3 when the CM is not cleaved; wherein the CM comprises at least a first cleavage site; wherein the TBM comprises a VH, and the activatable antibody further comprises a second polypeptide comprising a VL; and wherein the activatable antibody binds to CD3 via the VH and VL when the CM is cleaved. In some embodiments, the activatable antibody comprises a VH comprises a CDR-H1 comprising the amino acid sequence of SEQ ID NO: 61, a CDR-H2 comprising the amino acid sequence of SEQ ID NO: 62, and a CDR-H3 comprising the amino acid sequence of SEQ ID NO: 63; and/or a VL comprising a CDR-L1 comprising the amino acid sequence of SEQ ID NO: 64, a CDR-L2 comprising the amino acid sequence of SEQ ID NO: 65, and a CDR-L3 comprising the amino acid sequence of SEQ ID NO: 66. In some embodiments, the activatable antibody comprises a VH comprising the amino acid sequence of SEQ ID NO: 67, and/or a VL comprising the amino acid sequence of SEQ ID NO: 68.

[0394] In some embodiments, there is provided an activatable antibody targeting CD3 comprising a first polypeptide comprising, from N-terminus to C-terminus, a MM, a CM, and a scFv, wherein the MM comprises the amino acid sequence of SEQ ID NO: 35, wherein the MM inhibits binding of the activatable antibody to CD3 when the CM is not cleaved; wherein the CM comprises at least a first cleavage site; and wherein the activatable antibody binds to CD3 via the scFv when the CM is cleaved. In some embodiments, the scFv comprises a VH comprises a CDR-H1 comprising the amino acid sequence of SEQ ID NO: 61, a CDR-H2 comprising the amino acid sequence of SEQ ID NO: 62, and a CDR-H3 comprising the amino acid sequence of SEQ ID NO: 63; and/or a VL comprising a CDR-L1 comprising the amino acid sequence of SEQ ID NO: 64, a CDR-L2 comprising the amino acid sequence of SEQ ID NO: 65, and a CDR-L3 comprising the amino acid sequence of SEQ ID NO: 66. In some embodiments, the scFv comprises a VH comprising the amino acid sequence of SEQ ID NO: 67, and/or a VL comprising the amino acid sequence of SEQ ID NO: 68. In some embodiments, the scFv comprises from the N-terminus to the C-terminus: a VL and a VH. In some embodiments, the scFv comprises from the N-terminus to the C-terminus: a VH and a VL. In some embodiments, the scFv comprises the amino acid sequence of SEQ ID NO: 79.

[0395] In some embodiments, the activatable antibody targeting CD3 is a multispecific antibody, such as a bispecific antibody. In some embodiments, the activatable antibody targeting CD3 is a bispecific T cell engager (BiTE) molecule, which also targets a tumor antigen, such as HER2.

[0396] In some embodiments, there is provided an activatable bispecific T cell engager molecule, comprising: a first polypeptide comprising a first CH3 domain, a second polypeptide comprising a second CH3 domain, and a third polypeptide, wherein:

[0397] (i) the first polypeptide comprises a structure represented by the formula:

VH-CH1-hinge-CH2-first CH3;

[0398] (ii) the second polypeptide comprises a structure represented by the formula:

MM1-CM1-scFv-hinge-CH2-second CH3; and

[0399] (iii) the third polypeptide comprises a structure represented by the formula:

MM2-CM2-VL-CL;

wherein:

[0400] VL is an immunoglobulin light chain variable domain;

[0401] VH is an immunoglobulin heavy chain variable domain;

[0402] scFv is a single-chain variable fragment;

[0403] CL is an immunoglobulin light chain constant domain;

[0404] CH1 is an immunoglobulin heavy chain constant domain 1;

[0405] CH2 is an immunoglobulin heavy chain constant domain 2;
[0406] hinge is an immunoglobulin hinge region connecting the CH1 and CH2 domains;
[0407] MM1 is a first masking peptide;
[0408] MM2 is a second masking peptide:
[0409] CM1 is a first cleavable peptide; and
[0410] CM2 is a second cleavable peptide:
   wherein VL and VH associate to form a first Fv that specifically binds to a tumor antigen (e.g., HER2); wherein the scFv specifically binds to CD3; wherein MM1 inhibits the binding of the scFv to CD3 when CM1 is not cleaved; and wherein MM2 inhibits the binding of the first Fv to the tumor antigen (e.g., HER2) when CM2 is not cleaved. In some embodiments, the MM1 comprises the amino acid sequence of SEQ ID NO: 35. In some embodiments, the scFv comprises a VH comprises a CDR-H1 comprising the amino acid sequence of SEQ ID NO: 61, a CDR-H2 comprising the amino acid sequence of SEQ ID NO: 62, and a CDR-H3 comprising the amino acid sequence of SEQ ID NO: 63; and/or a VL comprising a CDR-L1 comprising the amino acid sequence of SEQ ID NO: 64, a CDR-L2 comprising the amino acid sequence of SEQ ID NO: 65, and a CDR-L3 comprising the amino acid sequence of SEQ ID NO: 66. In some embodiments, the scFv comprises a VH comprising the amino acid sequence of SEQ ID NO: 67, and/or a VL comprising the amino acid sequence of SEQ ID NO: 68. In some embodiments, the scFv comprises the amino acid sequence of SEQ ID NO: 79.

[0411] In some embodiments, the activatable BiTE molecule targets HER2. In some embodiments, the MM2 comprises the amino acid sequence of SEQ ID NO: 36. In some embodiments, the VH comprises an CDR-H1 comprising the amino acid sequence of SEQ ID NO: 69, a CDR-H2 comprising the amino acid sequence of SEQ ID NO: 70, and a CDR-H3 comprising the amino acid sequence of SEQ ID NO: 71. In some embodiments, the VL comprises a CDR-L1 comprising the amino acid sequence of SEQ ID NO: 72, a CDR-L2 comprising the amino acid sequence of SEQ ID NO: 73, and a CDR-L3 comprising the amino acid sequence of SEQ ID NO: 74. In some embodiments, the VH comprises the amino acid sequence of SEQ ID NO: 75. In some embodiments, the VL comprises the amino acid sequence of SEQ ID NO: 76.

[0412] In some embodiments according to any one of the activatable antibodies (including BITE molecules) targeting CD3 described herein, the activatable antibody comprises a first CH3 domain and a second CH3 domain that do not comprise any one or combination of the engineered disulfide bonds or salt bridges described herein. In some embodiments, the activatable antibody comprises a first CH3 domain and a second CH3 domain that comprise any one or combination of the engineered disulfide bonds or salt bridges described herein. In some embodiments, the first CH3 domain comprises D356K, E357K, S364K and S400C substitutions and the second CH3 domain comprises L351D, K370D, N390C and K439D substitutions, or the first CH3 domain comprises L351D, K370D, N390C and K439D substitutions and the second CH3 domain comprises D356K, E357K, S364K and S400C substitutions. In some embodiments, the activatable antibody comprises an IgG1 Fc region, such as an IgG1 Fc having an N297A substitution.

[0413] Exemplary BiTE molecules are shown, for example, in Tables 10 and 11. In some embodiments, there is provided an activatable bispecific T cell engager molecule comprising a first polypeptide comprising the amino acid sequence of SEQ ID NO: 115, a second polypeptide comprising the amino acid sequence of SEQ ID NO: 116, and a third polypeptide comprising the amino acid sequence of SEQ ID NO: 117.

### Activatable Antibodies Targeting HER2

[0414] The present application provides activatable antibodies, activatable antibody fragments, and polypeptides that target HER2, comprising a masking moiety (MM) comprising the amino acid sequence of SEQ ID NO: 36.

[0415] In some embodiments, there is provided an antibody light chain comprising a polypeptide comprising, from N-terminus to C-terminus, a MM, a cleavable moiety (CM), and a target binding moiety (TBM), wherein the MM comprises the amino acid sequence of SEQ ID NO: 36; wherein the CM comprises at least a first cleavage site; and wherein the TBM comprises a VL of an anti-HER2 antibody. In some embodiments, the anti-HER2 antibody comprises a VL comprising a CDR-L1 comprising the amino acid sequence of SEQ ID NO: 72, a CDR-L2 comprising the amino acid sequence of SEQ ID NO: 73, and a CDR-L3 comprising the amino acid sequence of SEQ ID NO: 74.

[0416] In some embodiments, there is provided an antibody heavy chain comprising a polypeptide comprising, from N-terminus to C-terminus, a MM, a CM, and a TBM, wherein the MM comprises the amino acid sequence of SEQ ID NO: 36; wherein the CM comprises at least a first cleavage site; and wherein the TBM comprises a VH of an anti-HER2 antibody. In some embodiments, the anti-HER2 antibody comprises a VH comprising an CDR-HI comprising the amino acid sequence of SEQ ID NO: 69, a CDR-H2 comprising the amino acid sequence of SEQ ID NO: 70, and a CDR-H3 comprising the amino acid sequence of SEQ ID NO: 71.

[0417] In some embodiments, there is provided an activatable antibody targeting HER2 comprising a first polypeptide comprising, from N-terminus to C-terminus, a MM, a CM, and a TBM, wherein the MM comprises the amino acid sequence of SEQ ID NO: 36, wherein the MM inhibits binding of the activatable antibody to HER2 when the CM is not cleaved; wherein the CM comprises at least a first cleavage site; wherein the TBM comprises a VL, and the activatable antibody further comprises a second polypeptide comprising a VH; and wherein the activatable antibody binds to HER2 via the VH and VL when the CM is cleaved. In some embodiments, the activatable antibody comprises a VH comprising an CDR-H1 comprising the amino acid sequence of SEQ ID NO: 69, a CDR-H2 comprising the amino acid sequence of SEQ ID NO: 70, and a CDR-H3 comprising the amino acid sequence of SEQ ID NO: 71; and/or a VL comprising a CDR-L1 comprising the amino acid sequence of SEQ ID NO: 72, a CDR-L2 comprising the amino acid sequence of SEQ ID NO: 73, and a CDR-L3 comprising the amino acid sequence of SEQ ID NO: 74. In some embodiments, the activatable antibody comprises a VH comprising the amino acid sequence of SEQ ID NO: 75, and/or a VL comprising the amino acid sequence of SEQ ID NO: 76.

[0418] In some embodiments, there is provided an activatable antibody targeting HER2 comprising a first polypeptide comprising, from N-terminus to C-terminus, a MM, a CM, and a TBM, wherein the MM comprises the amino acid sequence of SEQ ID NO: 36, wherein the MM inhibits binding of the activatable antibody to HER2 when the CM is not cleaved; wherein the CM comprises at least a first cleavage site; wherein the TBM comprises a VH, and the activatable antibody further comprises a second polypeptide comprising a VL; and wherein the activatable antibody binds to HER2 via the VH and VL when the CM is cleaved. In some embodiments, the activatable antibody comprises a VH comprising an CDR-H1 comprising the amino acid sequence of SEQ ID NO: 69, a CDR-H2 comprising the amino acid sequence of SEQ ID NO: 70, and a CDR-H3 comprising the amino acid sequence of SEQ ID NO: 71; and/or a VL comprising a CDR-L1 comprising the amino acid sequence of SEQ ID NO: 72, a CDR-L2 comprising the amino acid sequence of SEQ ID NO: 73, and a CDR-L3 comprising the amino acid sequence of SEQ ID NO: 74. In some embodiments, the activatable antibody comprises a VH comprising the amino acid sequence of SEQ ID NO: 75, and/or a VL comprising the amino acid sequence of SEQ ID NO: 76.

[0419] In some embodiments, there is provided an activatable antibody targeting HER2 comprising a first polypeptide comprising, from N-terminus to C-terminus, a MM, a CM, and a scFv, wherein the MM comprises the amino acid sequence of SEQ ID NO: 36, wherein the MM inhibits binding of the activatable antibody to HER2 when the CM is not cleaved; wherein the CM comprises at least a first cleavage site; and wherein the activatable antibody binds to HER2 via the scFv when the CM is cleaved. In some embodiments, the scFv comprises a VH comprising an CDR-H1 comprising the amino acid sequence of SEQ ID NO: 69, a CDR-H2 comprising the amino acid sequence of SEQ ID NO: 70, and a CDR-H3 comprising the amino acid sequence of SEQ ID NO: 71; and/or a VL comprising a CDR-L1 comprising the amino acid sequence of SEQ ID NO: 72, a CDR-L2 comprising the amino acid sequence of SEQ ID NO: 73, and a CDR-L3 comprising the amino acid sequence of SEQ ID NO: 74. In some embodiments, the scFv comprises a VH comprising the amino acid sequence of SEQ ID NO: 75, and/or a VL comprising the amino acid sequence of SEQ ID NO: 76. In some embodiments, the scFv comprises from the N-terminus to the C-terminus: a VL and a VH. In some embodiments, the scFv comprises from the N-terminus to the C-terminus: a VH and a VL. In some embodiments, the scFv comprises the amino acid sequence of SEQ ID NO: 79.

[0420] In some embodiments, the activatable antibody targeting HER2 is a multispecific antibody, such as a bispecific antibody. In some embodiments, the activatable antibody targeting HER2 is a bispecific T cell engager (BiTE) molecule, which also targets CD3.

[0421] In some embodiments according to any one of the activatable antibodies (including BiTE molecules) targeting HER2 described herein, the activatable antibody comprises a first CH3 domain and a second CH3 domain that do not comprise any one or combination of the engineered disulfide bonds or salt bridges described herein. In some embodiments, the activatable antibody comprises a first CH3 domain and a second CH3 domain that comprise any one or combination of the engineered disulfide bonds or salt bridges described herein. In some embodiments, the first CH3 domain comprises D356K, E357K, S364K and S400C substitutions and the second CH3 domain comprises L351D, K370D, N390C and K439D substitutions, or the first CH3 domain comprises L351D, K370D. N390C and K439D substitutions and the second CH3 domain comprises D356K, E357K, S364K and S400C substitutions. In some embodiments, the activatable antibody comprises an IgG1 Fc region, such as an IgG1 Fc having an N297A substitution.

### V. VARIANTS AND DERIVATIVES

[0422] Also contemplated herein are variants and derivatives of any one of the heterodimeric proteins, multispecific antibodies, and activatable antibodies described herein.

[0423] In some embodiments, the heterodimeric protein or antibody derivative is derived from modifications of the amino acid sequences of the parent heterodimeric protein or antibody while conserving the overall molecular structure of the parent heterodimeric protein or antibody. Amino acid sequences of any regions of the parent heterodimeric protein or antibody chains may be modified, such as framework regions, CDR regions, or constant regions. Types of modifications include substitutions, insertions, deletions, or combinations thereof, of one or more amino acids of the parent heterodimeric protein or antibody.

[0424] In some embodiments, the antibody (e.g., multispecific antibody or activatable antibody) derivative comprises a polypeptide that is at least 80%, at least 85%, at least 90%, at least 91%, at least 92%, at least 93%, at least 94%, at least 95%, at least 96%, at least 97%, at least 98%, or at least 99% identical to the amino acid sequence as set forth in any of SEQ ID NOs: 84-143. In some embodiments, the antibody (e.g., multispecific antibody or activatable antibody) derivative comprises a VL or VH region that is at least 80%, at least 85%, at least 90%, at least 91%, at least 92%, at least 93%, at least 94%, at least 95%, at least 96%, at least 97%, at least 98%, or at least 99% identical to the amino acid sequence as set forth in any of SEQ ID NOs: 43, 44, 51, 52, 59, 60, 67, 68, 75 and 76. In some embodiments, the antibody derivative comprises a CDR-HI amino acid sequence region that is at least 80%, at least 85%, at least 90%, at least 91%, at least 92%, at least 93%, at least 94%, at least 95%, at least 96%, at least 97%, at least 98%, or at least 99% identical to an amino acid sequence as set forth in any of SEQ ID NOs: 37, 45, 53, 61, and 69. In some embodiments, the antibody derivative comprises a CDR-H2 amino acid sequence region that is at least 80%, at least 85%, at least 90%, at least 91%, at least 92%, at least 93%, at least 94%, at least 95%, at least 96%, at least 97%, at least 98%, or at least 99% identical to an amino acid sequence as set forth in any of SEQ ID NOs: 38, 46, 54, 62, and 70. In some embodiments, the antibody derivative comprises a CDR-H3 amino acid sequence region that is at least 80%, at least 85%, at least 90%, at least 91%, at least 92%, at least 93%, at least 94%, at least 95%, at least 96%, at least 97%, at least 98%, or at least 99% identical to an amino acid sequence as set forth in any of SEQ ID NOs: 39, 47, 55, 63, and 71. In some embodiments, the antibody derivative comprises a CDR-L1 amino acid sequence region that is at least 80%, at least 85%, at least 90%, at least 91%, at least 92%, at least 93%, at least 94%, at least 95%, at least 96%, at least 97%, at least 98%, or at least 99% identical to an amino acid sequence as set forth in any of SEQ ID NOs: 40, 48, 56, 64, and 72. In some embodiments, the antibody derivative comprises a CDR-L2 amino acid sequence region that is at least 80%, at least 85%, at least 90%, at least 91%, at least 92%, at least 93%, at least 94%, at least 95%, at least 96%, at least 97%, at least 98%, or at least 99% identical to an amino acid sequence as set forth in any of SEQ ID NOs: 41, 49, 57, 65, and 73. In some embodiments, the antibody derivative comprises a CDR-L3 amino acid sequence region that is at least 80%, at least 85%, at least 90%, at least 91%, at least 92%, at least 93%, at least 94%, at least 95%, at least 96%, at least 97%, at least 98%, or at least 99% identical to an amino acid sequence as set forth in any of SEQ ID NOs: 42, 50, 58, 66, and 74.

[0425] In some embodiments, the heterodimeric protein or antibody derivative comprises 1, 2, 3, 4, 5, 6, 7, 8, 9, 10, 11, 12, 13, 14, or 15 conservative or non-conservative substitutions, and/or 1, 2, 3, 4, 5, 6, 7, 8, 9, 10, 11, 12, 13, 14, or 15 additions and/or deletions to an amino acid sequence of a heterodimeric protein or antibody described herein.

[0426] Amino acid substitutions encompass both conservative substitutions and non-conservative substitutions. The term “conservative amino acid substitution” means a replacement of one amino acid with another amino acid where the two amino acids have similarity in certain physico-chemical properties such as polarity, charge, solubility, hydrophobicity, hydrophilicity, and/or the amphipathic nature of the residues involved. For example, substitutions typically may be made within each of the following groups: (a) nonpolar (hydrophobic) amino acids, such as alanine, leucine, isoleucine, valine, proline, phenylalanine, tryptophan, and methionine; (b) polar neutral amino acids, such as glycine, serine, threonine, cysteine, tyrosine, asparagine, and glutamine; (c) positively charged (basic) amino acids, such as arginine, lysine, and histidine; and (d) negatively charged (acidic) amino acids, such as aspartic acid and glutamic acid.

[0427] The modifications may be made in any positions of the amino acid sequences of an antibody, including the CDRs, framework regions, or constant regions. In some embodiments, the present application provides an antibody derivative that contains the VH and VL CDR sequences of an illustrative antibody described herein, yet contains framework sequences different from those of the illustrative antibody. Such framework sequences can be obtained from public DNA databases or published references that include germline antibody gene sequences. For example, germline DNA sequences for human heavy and light chain variable region genes can be found in the Genbank database or in the “VBase” human germline sequence database (Kabat et al., Sequences of Proteins of Immunological Interest. Fifth Edition, U.S. Department of Health and Human Services, NIH Publication No. 91-3242 (1991): Tomlinson et al., J. Mal. Biol. 227:776-798 (1992); and Cox et al., Eur. J. Immunol. 24:827-836 (1994)). Framework sequences that may be used in constructing an antibody derivative include those that are structurally similar to the framework sequences used by illustrative antibodies of the application For example, the CDR-H1, CDR-H2, and CDR-H3 sequences, and the CDR-L1, CDR-L2, and CDR-L3 sequences of an illustrative antibody can be grafted onto framework regions that have the identical sequence as that found in the germline immunoglobulin gene from which the framework sequence derive, or the CDR sequences can be grafted onto framework regions that contain one or more mutations as compared to the germline sequences.

[0428] In some embodiments, the antibody derivative is a chimeric antibody, which comprises an amino acid sequence of an illustrative antibody described herein. In one example, one or more CDRs from one or more illustrative antibodies are combined with CDRs from an antibody from a non-human animal, such as mouse or rat. In another example, all of the CDRs of the chimeric antibody are derived from one or more illustrative antibodies. In some particular embodiments, the chimeric antibody comprises one, two, or three CDRs from the heavy chain variable region and/or one, two, or three CDRs from the light chain variable region of an illustrative antibody. Chimeric antibodies can be generated using conventional methods known in the art.

[0429] Another type of modification is to mutate amino acid residues within the CDR regions of the VH and/or VL chain. Site-directed mutagenesis or PCR-mediated mutagenesis can be performed to introduce the mutation(s) and the effect on antibody binding, or other functional property of interest, can be evaluated in in vitro or in vivo assays known in the art. Typically, conservative substitutions are introduced. The mutations may be amino acid additions and/or deletions. Moreover, typically no more than one, two, three, four or five residues within a CDR region are altered. In some embodiments, the antibody derivative comprises 1, 2, 3, or 4 amino acid substitutions in the heavy chain CDRs and/or in the light chain CDRs. In another embodiment, the amino acid substitution is to change one or more cysteines in an antibody to another residue, such as, without limitation, alanine or serine. The cysteine may be a canonical or non-canonical cysteine. In some embodiments, the antibody derivative has 1, 2, 3, or 4 conservative amino acid substitutions in the heavy chain CDR regions relative to the amino acid sequences of an illustrative antibody.

[0430] Modifications may also be made to the framework residues within the VH and/or VL regions. Typically, such framework variants are made to decrease the immunogenicity of the antibody. One approach is to “back mutate” one or more framework residues to the corresponding germline sequence. An antibody that has undergone somatic mutation may contain framework residues that differ from the germline sequence from which the antibody is derived. Such residues can be identified by comparing the antibody framework sequences to the germline sequences from which the antibody is derived. To return the framework region sequences to their germline configuration, the somatic mutations can be “back mutated” to the germline sequence by, for example, site-directed mutagenesis or PCR-mediated mutagenesis.

[0431] In addition, modifications may also be made within the Fc region of an illustrative antibody, typically to alter one or more functional properties of the antibody, such as serum half-life, complement fixation, Fc receptor binding, and/or antigen-dependent cellular cytotoxicity. In one example, the hinge region of CH1 is modified such that the number of cysteine residues in the hinge region is altered, e.g., increased or decreased. This approach is described further in U.S. Pat. No. 5,677,425. The number of cysteine residues in the hinge region of CH1 is altered to, for example, facilitate assembly of the light and heavy chains or to increase or decrease the stability of the antibody. In another case, the Fc hinge region of an antibody is mutated to decrease the biological half-life of the antibody.

[0432] In some embodiments, the Fc region of the heterodimeric protein or antibody described herein has at least one (e.g., at least one, two or three or more) amino acid substitution in addition to the amino acid substitutions that form engineered disulfide bonds or salt bridges as described herein compared to the Fc region of a wild-type IgG or a wild-type antibody. In some embodiments, the Fc region has at least 80%, at least 85%, at least 90%, at least 95% or more homology with a native sequence Fc region and/or with an Fc region of a parent polypeptide.

[0433] Furthermore, the Fc region may be modified to alter its potential glycosylation site or pattern in accordance with routine experimentation known in the art. In another aspect, the present application provides a derivative of a heterodimeric protein or antibody described herein that contains at least one mutation in a variable region of a light chain or heavy chain that changes the pattern of glycosylation in the variable region. Such an antibody derivative may have an increased affinity and/or a modified specificity for binding an antigen. The mutations may add a novel glycosylation site in the V region, change the location of one or more V region glycosylation site(s), or remove a pre-existing V region glycosylation site. In some embodiments, the present application provides a derivative of an antibody described herein having a potential N-linked glycosylation site at asparagine in the heavy chain variable region, wherein the potential N-linked glycosylation site in one heavy chain variable region is removed. In some embodiments, the present application provides a derivative of an antibody described herein having a potential N-linked glycosylation site at asparagine in the heavy chain variable region, wherein the potential N-linked glycosylation site in both heavy chain variable regions is removed. Method of altering the glycosylation pattern of an antibody is known in the art, such as those described in U.S. Pat. No. 6,933,368, the application of which incorporated herein by reference.

[0434] In some embodiments, the antibodies described herein (e.g., multispecific antibodies and activatable antibodies) may be in any class, such as IgG, IgM, IgE, IgA, or IgD. In some embodiments, the activatable antibodies described herein (e.g., a CD3 and/or HER2 antibody) are in the IgG class, such as IgG1, IgG2, IgG3, or IgG4 subclass. An antibody described herein antibody can be converted from one class or subclass to another class or subclass using methods known in the art. An exemplary method for producing an antibody in a desired class or subclass comprises the steps of isolating a nucleic acid encoding a heavy chain of an antibody described herein (e.g., multispecific or activatable antibody) and a nucleic acid encoding a light chain of an antibody described herein (e.g., multispecific or activatable antibody), isolating the sequence encoding the VH region, ligating the VH sequence to a sequence encoding a heavy chain constant region of the desired class or subclass, expressing the light chain gene and the heavy chain construct in a cell, and collecting the antibody.

[0435] Heterodimeric proteins or antibody variants are also provided with amino-terminal leader extensions. For example, one or more amino acid residues of the amino-terminal leader sequence are present at the amino-terminus of any one or more heavy or light chains of an antibody.

[0436] The heterodimeric proteins or antibodies (e.g., multispecific antibodies or activatable antibodies) described herein may be further modified. In some embodiments, the heterodimeric protein or antibody is linked to an additional molecular entity. Examples of additional molecular entities include pharmaceutical agents, peptides or proteins, detection agent or labels, and antibodies.

[0437] In some embodiments, a heterodimeric protein or antibody of the present application is linked to a pharmaceutical agent. Examples of pharmaceutical agents include cytotoxic agents or other cancer therapeutic agents, and radioactive isotopes. Specific examples of cytotoxic agents include taxol, cytochalasin B, gramicidin D, ethidium bromide, emetine, mitomycin, etoposide, tenoposide, vincristine, vinblastine, colchicin, doxorubicin, daunorubicin, dihydroxy anthracin dione, mitoxantrone, mithramycin, actinomycin D, 1-dehydrotestosterone, glucocorticoids, procaine, tetracaine, lidocaine, propranolol, and purompycin and analogs or homologs thereof. Therapeutic agents also include, for example, antimetabolites (e.g., methotrexate, 6-mercaptopurine, 6-thioguanine, cytarabine, 5-fluorouracil decarbazine), alkylating agents (e.g., mechlorethamine, thioepa chlorambucil, melphalan, carmustine (BSNU) and lomustine (CCNU), cyclothosphamide, busulfan, dibromomannitol, streptozotocin, mitomycin C, and cis-dichlorodiamine platinum (II) (DDP) cisplatin), anthracyclines (e.g., daunorubicin (formerly daunomycin) and doxorubicin), antibiotics (e.g., dactinomycin (formerly actinomycin), bleomycin, mithramycin, and anthramycin (AMC)), and anti-mitotic agents (e.g., vincristine and vinblastine). Examples of radioactive isotopes that can be conjugated to antibodies for use diagnostically or therapeutically include, but are not limited to, iodine131, indiumrn, yttrium90 and lutetium 177. Methods for linking a polypeptide to a pharmaceutical agent are known in the art, such as using various linker technologies. Examples of linker types include hydrazones, thioethers, esters, disulfides and peptide-containing linkers. For further discussion of linkers and methods for linking therapeutic agents to antibodies see e.g., Saito et al., Adv. Drug Deliv. Rev. 55:199-215 (2003); Trail, et al., Cancer Immunol. Immunother. 52:328-337 (2003); Payne, Cancer Cell 3:207-212 (2003): Allen, Nat. Rev. Cancer 2:750-763 (2002); Pastan and Kreitman, Curr. Opin. Investig. Drugs 3: 1089-1091 (2002); Senter and Springer (2001) Adv. Drug De/iv. Rev. 53:247-264.

[0438] In some embodiments, a heterodimeric protein or antibody of the present application is conjugated to a label and/or a cytotoxic agent. As used herein, a label is a moiety that facilitates detection of the antibody and/or facilitates detection of a molecule to which the antibody binds. Nonlimiting exemplary labels include, but are not limited to, radioisotopes, fluorescent groups, enzymatic groups, chemiluminescent groups, biotin, epitope tags, metal-binding tags, etc. One skilled in the art can select a suitable label according to the intended application.

[0439] As used herein, a cytotoxic agent is a moiety that reduces the proliferative capacity of one or more cells. A cell has reduced proliferative capacity when the cell becomes less able to proliferate, for example, because the cell undergoes apoptosis or otherwise dies, the cell fails to proceed through the cell cycle and/or fails to divide, the cell differentiates, etc. Nonlimiting exemplary cytotoxic agents include, but are not limited to, radioisotopes, toxins, and chemotherapeutic agents. One skilled in the art can select a suitable cytotoxic according to the intended application.

[0440] In some embodiments, a label and/or a cytotoxic agent is conjugated to a heterodimeric protein or antibody using chemical methods in vitro. Nonlimiting exemplary chemical methods of conjugation are known in the art, and include services, methods and/or reagents commercially available from, e.g., Thermo Scientific Life Science Research Produces (formerly Pierce; Rockford, Ill.), Prozyme (Hayward, Calif.), SACRI Antibody Services (Calgary, Canada), AbD Serotec (Raleigh, N.C.), etc. In some embodiments, when a label and/or cytotoxic agent is a polypeptide, the label and/or cytotoxic agent can be expressed from the same expression vector with at least one antibody chain to produce a polypeptide comprising the label and/or cytotoxic agent fused to an antibody chain. One skilled in the art can select a suitable method for conjugating a label and/or cytotoxic agent to an antibody according to the intended application.

### VI. METHODS OF PREPARATION

[0441] In one aspect, the present application provides methods for preparing the heterodimeric proteins, multispecific antibodies, or activatable antibodies described herein. For example, methods for preparing a heterodimeric protein (e.g., multispecific antibody) or activatable antibody comprising culturing a host cell comprising one or more nucleic acid(s) or vector(s) that encode heterodimeric protein (e.g., multispecific antibody) or activatable antibody polypeptides under conditions that allow expression of the nucleic acid(s) or vector, and recovering the heterodimeric protein polypeptides or activatable antibody polypeptides from the host cell culture are provided.

[0442] Polypeptides (e.g., any of the heterodimeric proteins, multispecific antibodies or activatable antibodies described above) of the present application may be produced using recombinant methods and compositions, e.g., as described in U.S. Pat. No. 4,816,567. In some embodiments, isolated nucleic acids encoding any or the polypeptides (e.g., any of the heterodimeric proteins, multispecific antibodies or activatable antibodies described above) are provided. In some embodiments, there is provided one or more nucleic acids encoding the first polypeptide and/or the second polypeptide of a heterodimeric protein. In some embodiments, there is provided one or more nucleic acids encoding an amino acid sequence comprising the VL(s) and/or an amino acid sequence comprising the VH(s) of the multispecific antibodies or activatable antibodies (e.g., the light and/or heavy chains of the antibodies). In some embodiments, one or more vectors (e.g., expression vectors) comprising such nucleic acids are provided herein. In some embodiments, a host cell comprising (e.g., has been transformed with) one or more vectors comprising nucleic acid(s) encoding the heterodimeric protein, multispecific antibody, or activatable antibody described herein. In some embodiments, the host cell is eukaryotic, e.g. a yeast cell, an insect cell, a Chinese Hamster Ovary (CHO) cell or lymphoid cell (e.g., YO, NS0, Sp20 cell).

[0443] For recombinant production of polypeptides (e.g., any of the heterodimeric proteins, multispecific antibodies or activatable antibodies described above) of the present application, nucleic acid encoding a polypeptide (e.g., a heterodimeric protein, multispecific antibody or activatable antibody described above), e.g., as described above, is isolated and inserted into one or more vectors for further cloning and/or expression in a host cell. Such nucleic acid may be readily isolated and sequenced using conventional procedures (e.g., by using oligonucleotide probes that are capable of binding specifically to genes encoding the polypeptide(s)).

[0444] Suitable host cells for cloning or expression of poly peptide-encoding vectors include prokaryotic or eukaryotic cells. For example, polypeptides may be produced in bacteria, in particular when glycosylation and Fc effector function are not needed (see. e.g., U.S. Pat. Nos. 5,648,237, 5,789,199, and 5,840,523; See also Charlton, Methods in Molecular Biology. Vol. 248 (B. K. C. Lo, ed., Humana Press, Totowa, N.J., 2003), pp. 245-254, describing expression of antibody fragments in E. coli). After expression, the polypeptide may be isolated from the bacterial cell paste in a soluble fraction and may be further purified.

[0445] In addition to prokaryotes, eukaryotic microbes such as filamentous fungi or yeast are suitable cloning or expression hosts for polypeptide-encoding vectors, including fungi and yeast strains whose glycosylation pathways have been “humanized,” resulting in the production of a polypeptide with a partially or fully human glycosylation pattern. See Gerngross, Nat. Biotech. 22:1409-1414 (2004), and Li et al., Nat. Biotech. 24:210-215 (2006).

[0446] Suitable host cells for the expression of glycosylated polypeptides are also derived from multicellular organisms (invertebrates and vertebrates). Examples of invertebrate cells include plant and insect cells. Numerous baculoviral strains have been identified which may be used in conjunction with insect cells, particularly for transfection of Spodoptera frugiperda cells.

[0447] Plant cell cultures can also be utilized as hosts. See, e.g., U.S. Pat. Nos. 5,959,177, 6,040,498, 6,420,548, 7,125,978, and 6,417,429 (describing PLANTIBODIES™ technology for producing antibodies in transgenic plants).

[0448] Vertebrate cells may also be used as hosts. For example, mammalian cell lines that are adapted to grow in suspension may be useful. Other examples of useful mammalian host cell lines are monkey kidney CV1 line transformed by SV40 (COS-7): human embryonic kidney line (293 or 293 cells as described, e.g., in Graham et al., J. Gen Virol. 36:59 (1977)); baby hamster kidney cells (BHK); mouse sertoli cells (TM4 cells as described, e.g., in Mather, Biol. Reprod. 23:243-251 (1980)); monkey kidney cells (CV1); African green monkey kidney cells (VERO-76); human cervical carcinoma cells (HELA); canine kidney cells (MDCK: buffalo rat liver cells (BRL 3A); human lung cells (W138); human liver cells (Hep G2); mouse mammary tumor (MMT 060562); TRI cells, as described, e.g., in Mather et al., Annals N.Y. Acad. Sci. 383:44-68 (1982); MRC 5 cells; and FS4 cells. Other useful mammalian host cell lines include Chinese hamster ovary (CHO) cells, including DHFR⁻ CHO cells (Urlaub et al., Proc. Natl. Acad. Sci. USA 77:4216 (1980)); and myeloma cell lines such as Y0, NS0 and Sp2/0. For a review of certain mammalian host cell lines suitable for antibody production, see. e.g., Yazaki and Wu, Methods in Molecular Biology, Vol. 248 (B. K. C. Lo, ed., Humana Press, Totowa, N.J.), pp. 255-268 (2003).

[0449] In order for some secreted proteins to express and secrete in large quantities, a leader sequence from a heterologous protein may be desirable. In some embodiments, employing heterologous leader sequences may be advantageous in that a resulting mature polypeptide may remain unaltered as the leader sequence is removed in the ER during the secretion process. The addition of a heterologous leader sequence may be required to express and secrete some proteins.

[0450] Certain exemplary leader sequence sequences are described, e.g., in the online Leader sequence Database maintained by the Department of Biochemistry, National University of Singapore. See Choo et al., BMC Bioinformatics. 6: 249 (2005); and PCT Publication No. WO 2006/081430.

### VII. COMPOSITIONS AND KITS

[0451] In some embodiments, the present application provides pharmaceutical compositions comprising any one of the heterodimeric proteins, multispecific antibodies, or activatable antibodies disclosed herein, and a pharmaceutically acceptable carrier. The compositions can be prepared by conventional methods known in the art.

[0452] The term “pharmaceutically acceptable carrier” refers to any inactive substance that is suitable for use in a formulation for the delivery of a polypeptide (e.g., a heterodimeric protein, multispecific antibody, or activatable antibody). A carrier may be an anti-adherent, binder, coating, disintegrant, filler or diluent, preservative (such as antioxidant, antibacterial, or antifungal agent), sweetener, absorption delaying agent, wetting agent, emulsifying agent, buffer, and the like. Examples of suitable pharmaceutically acceptable carriers include water, ethanol, polyols (such as glycerol, propylene glycol, polyethylene glycol, and the like) dextrose, vegetable oils (such as olive oil), saline, buffer, buffered saline, and isotonic agents such as sugars, polyalcohols, sorbitol, and sodium chloride.

[0453] The compositions may be in any suitable forms, such as liquid, semi-solid, and solid dosage forms. Examples of liquid dosage forms include solution (e.g., injectable and infusible solutions), microemulsion, liposome, dispersion, or suspension. Examples of solid dosage forms include tablet, pill, capsule, microcapsule, and powder. A particular form of the composition suitable for delivering a polypeptide (e.g., a heterodimeric protein, multispecific antibody, or activatable antibody) is a sterile liquid, such as a solution, suspension, or dispersion, for injection or infusion. Sterile solutions can be prepared by incorporating the polypeptide (e.g., a heterodimeric protein, multispecific antibody, or activatable antibody) in the required amount in an appropriate carrier, followed by sterilization microfiltration. Dispersions may be prepared by incorporating the polypeptide into a sterile vehicle that contains a basic dispersion medium and other carriers. In the case of sterile powders for the preparation of sterile liquid, methods of preparation include vacuum drying and freeze-drying (lyophilization) to yield a powder of the active ingredient plus any additional desired ingredient from a previously sterile-filtered solution thereof. The various dosage forms of the compositions can be prepared by conventional techniques known in the art.

[0454] The relative amount of a polypeptide (e.g., a heterodimeric protein, multispecific antibody, or activatable antibody) included in the composition will vary depending upon a number of factors, such as the specific polypeptide and carriers used, dosage form, and desired release and pharmacodynamic characteristics. The amount of a (e.g., a heterodimeric protein, multispecific antibody, or activatable antibody) in a single dosage form will generally be that amount which produces a therapeutic effect, but may also be a lesser amount. Generally, this amount will range from about 0.01 percent to about 99 percent, from about 0.1 percent to about 70 percent, or from about 1 percent to about 30 percent relative to the total weight of the dosage form.

[0455] In addition to the polypeptide (e.g., a heterodimeric protein, multispecific antibody, or activatable antibody), one or more additional therapeutic agents may be included in the composition. The suitable amount of the additional therapeutic agent to be included in the composition can be readily selected by a person skilled in the art, and will vary depending on a number of factors, such as the particular agent and carriers used, dosage form, and desired release and pharmacodynamic characteristics. The amount of the additional therapeutic agent included in a single dosage form will generally be that amount of the agent, which produces a therapeutic effect, but may be a lesser amount as well.

[0456] Any of the polypeptides (e.g., a heterodimeric protein, multispecific antibody, or activatable antibody) and/or compositions (e.g., pharmaceutical compositions) described herein may be used in the preparation of a medicament (e.g., a medicament for use in treating or delaying progression of cancer in a subject in need thereof).

[0457] In some embodiments, provided herein is a kit comprising any one of the heterodimeric proteins, multispecific antibodies, activatable antibodies and/or compositions described herein. In some embodiments, the kit further comprises a package insert comprising instructions for use of the heterodimeric proteins, multispecific antibodies, activatable antibodies and/or compositions. The package insert may contain information about the indications, usage, dosage, administration, combination therapy, contraindications and/or warnings concerning the use of a therapeutic product. In some embodiments, the kit further comprises one or more buffers, e.g., for storing, transferring, administering, or otherwise using the heterodimeric proteins, multispecific antibodies, activatable antibodies and/or compositions. In some embodiments, the kit further comprises one or more containers for storing or administering (e.g., syringes, etc.) the heterodimeric proteins, multispecific antibodies, activatable antibodies and/or compositions. Also provided are articles of manufacture comprising any one of the heterodimeric proteins, multispecific antibodies, activatable antibodies and/or compositions described herein.

### VII. METHODS OF USE

[0458] The heterodimeric proteins, multispecific antibodies, activatable antibodies, and pharmaceutical compositions described herein are useful for therapeutic, diagnostic, or other purposes, such as modulating an immune response, treating cancer, enhancing efficacy of other cancer therapy, enhancing vaccine efficacy, or treating autoimmune diseases.

[0459] In some embodiments, there is provided a method for treating a disease or condition in a subject in need thereof comprising administering to the subject an effective amount of a pharmaceutical composition comprising any one of the heterodimeric proteins, multispecific antibodies, or activatable antibodies (e.g., activatable BiTE molecules) described herein. In some embodiments, the disease or condition is cancer. A variety of cancers may be treated or prevented with a method, use, or pharmaceutical composition provided by the present application.

[0460] In some embodiments, there is provided a method for treating a cancer in a subject in need thereof comprising administering to the subject an effective amount of a pharmaceutical composition comprising any one of the multispecific antibodies targeting one or more immune checkpoint molecules (e.g., any one of the PDL1×CD137, CD137×PDL1, or PDL1×CD137×CTLA4 antibodies) described herein. In some embodiments, the cancer is lung cancer. In some embodiments, the cancer is prostate cancer. In some embodiments, the cancer is melanoma. In some embodiments, the cancer is an advanced-stage cancer.

[0461] In some embodiments, there is provided a method for treating a cancer in a subject in need thereof comprising administering to the subject an effective amount of a pharmaceutical composition comprising any one of the BiTE or activatable BiTE molecules (e.g., any one of the HER2×CD3 antibodies or activatable HER2×CD3 antibodies) described herein. In some embodiments, the cancer is HER2-positive cancer. In some embodiments, the cancer is ovarian cancer.

[0462] In some embodiments, there is provided a method of enhancing an immune response in a mammal, which comprises administering to the mammal an effective amount of a pharmaceutical composition comprising any one of the heterodimeric proteins, multispecific antibodies, or activatable antibodies (e.g., activatable BiTE molecules) described herein. The term “enhancing immune response” or its grammatical variations, means stimulating, evoking, increasing, improving, or augmenting any response of a subject's immune system. The immune response may be a cellular response (i.e. cell-mediated, such as cytotoxic T lymphocyte mediated) or a humoral response (i.e. antibody-mediated response), and may be a primary or secondary immune response. Examples of enhancement of immune response include activation of PBMCs and/or T cells (including increasing secretion of one or more cytokines such as IL-2 and/or IFNγ). The enhancement of immune response can be assessed using a number of in vitro or in vivo measurements known to those skilled in the art, including, but not limited to, cytotoxic T lymphocyte assays, release of cytokines, regression of tumors, survival of tumor bearing animals, antibody production, immune cell proliferation, expression of cell surface markers, and cytotoxicity. Typically, methods of the present application enhance the immune response by a mammal when compared to the immune response by an untreated mammal or a mammal not treated using the recited methods.

[0463] In practicing the therapeutic methods, the heterodimeric proteins, multispecific antibodies, or activatable antibodies may be administered alone as monotherapy, or administered in combination with one or more additional therapeutic agents or therapies. Thus, in another aspect, the present application provides a combination therapy, which comprises a heterodimeric protein, multispecific antibody, or activatable antibody described herein in combination with one or more additional therapies or therapeutic agents for separate, sequential or simultaneous administration. The term “additional therapeutic agent” may refer to any therapeutic agent other than a heterodimeric protein, multispecific antibody, or activatable antibody provided by the application.

[0464] A wide variety of cancer therapeutic agents may be used in combination with a heterodimeric protein, multispecific antibody, or activatable antibody provided by the present application. One of ordinary skill in the art will recognize the presence and development of other cancer therapies, which can be used in combination with the methods and heterodimeric proteins, multispecific antibodies, or activatable antibodies of the present application, and will not be restricted to those forms of therapy set forth herein. Examples of categories of additional therapeutic agents that may be used in the combination therapy for treating cancer include (1) chemotherapeutic agents, (2) immunotherapeutic agents, and (3) hormone therapeutic agents. In some embodiments, the additional therapeutic is a viral gene therapy, an immune checkpoint inhibitor, a target therapy, a radiation therapies, and/or a chemotherapeutic. In some embodiments, the combination therapy comprises surgery to remove a tumor.

[0465] The dosage, dosing frequency, route of administration for the therapeutic methods described herein depend on a number of factors, such as the type, and severity of the disorder to be treated, the particular heterodimeric protein, multispecific antibody or activatable antibody administered, the time of administration, the duration of the treatment, the particular additional therapy administered, the age, sex, weight, condition, general health and prior medical history of the patient being treated, and like factors known in the medical arts.

[0466] Cancer treatments can be evaluated by, e.g., tumor regression, tumor weight or size shrinkage, time to progression, duration of survival, progression free survival, overall response rate, duration of response, quality of life, protein expression and/or activity. Approaches to determining efficacy of therapy can be employed, including for example, measurement of response through radiological imaging.

### EXAMPLES

[0467] The examples below are intended to be purely exemplary of the invention and should therefore not be considered to limit the invention in any way. The following examples and detailed description are offered by way of illustration and not by way of limitation.

### Example 1. Design of Fc Domain Mutations

[0468] Novel Fc mutations were designed, including disulfide bond mutations, charged mutations, and combinations thereof as shown in Tables 1A and 1B.

TABLE 1A
Novel Fc mutations designed

| | Mutations | CH3 SEQ |
|---|---|---|
| Designs | (first CH3 domain-second CH3 domain) | ID NOs |
| Disulfide | N390C-S400′C | 24, 23 |
| bond | S400C-N390′C | 23, 24 |
| | K392C-V397′C | 25, 26 |
| | V397C-K392′C | 26, 25 |
| | K392C-S400′C | 27, 28 |
| | S400C-K392′C | 28, 27 |
| Charge | E357K:T411K-L351′D:K370′D | 9, 10 |
| designs | E357K:S364K-L351′D:K370′D | 11, 12 |
| | D356K:E357K:S364K-L351′D:K370′D:K439′D | 13, 14 |
| Charge + | E357K:S364K:N390C-L351′D:K370′D:S400′C | 15, 16 |
| disulfide | E357K:S364K:S400C-L351′D:K370′D:N390′C | 17, 18 |
| bond | D356K:E357K:S364K:N390C- | 19, 20 |
| designs | L351′D:K370′D:S400′C:K439′D | |
| | D356K:E357K:S364K:S400C- | 21, 22 |
| | L351′D:K370′D:N390′C:K439′D | |

TABLE 1B
Fc mutations ID.

| Mutations | CH3 SEQ | Mutations |
|---|---|---|
| ID | ID NOs | (first CH3 domain-second CH3 domain) |
| TRF01 | — | T366S, L368A, Y407V, Y349C-T366′W, S354′C |
| TRF02 | — | T350V, L351Y, F405A, Y407V-T350′V, T366′L, |
| | | K392′L, T394′W |
| TRF03 | — | K196Q, S228P, F296Y, E356K, R409K, H435R, |
| | | L445P-K196′Q, S228′P, F296′Y, |
| | | R409′K, K439′E, L445′P |
| TYM01 | 1, 2 | T366S, L368A, Y407V, N390C-T366′W, S400′C |
| TYM02 | 3, 4 | T366S, L368A, Y407V, S400C-T366′W, N390′C |
| TYM03 | — | Y349C, L368V, Y407V-S354′C, T366′W |
| TYM04 | — | L368V, Y407V-T366′W |
| TYM05 | 5, 6 | L368V, Y407V, N390C-T366′W, S400′C |
| TYM06 | 7, 8 | L368V, Y407V, S400C-T366′W, N390′C |
| TYM07 | 9, 10 | E357K:T411K-L351′D:K370′D |
| TYM08 | 11, 12 | E357K:S364K-L351′D:K370′D |
| TYM09 | 13, 14 | D or E356K:E357K:S364K- |
| | | L351′D:K370′D:K439′D |
| TYM10 | 15, 16 | E357K:S364K:N390C-L351′D:K370′D:S400′C |
| TYM11 | 17, 18 | E357K:S364K:S400C-L351′D:K370′D:N390′C |
| TYM12 | 19, 20 | D or E356K:E357K:S364K:N390C- |
| | | L351′D:K370′D:S400′C:K439′D |
| TYM13 | 21, 22 | D or E356K:E357K:S364K:S400C- |
| | | L351′D:K370′D:N390′C:K439′D |

### Example 2. Heterodimer Purity Assessment

[0469] In order to test the novel Fc mutations, heterodimers TYM01 to TYM013 and reference heterodimers were constructed. The corresponding novel Fc mutations are listed in Table 2. A Fab-Fc/Fc one-armed construct was designed with the mutations at the CH3 domain interface (FIG. 1A). In order to evaluate the effect of the mutations on hetero- and homodimerization of the CH3 domain, cloning in mammalian expression vector was performed such that the constructed CH3_A domain could be expressed in a light chain-heavy chain (“LC-HC”) half-body, and the CH3_B domain could be expressed in an Fc-only form. Plasmids encoding light chain (“LC”), heavy chain (“HC”), and Fc at a 2:1:1 molar ratio were co-transfected into HEK293 cells for transient expression. Excess LC over HC chain DNA was used in attempt to avoid the LC from being limiting. Cell culture supernatants were filtered through a 0.45 μm sterile filter. Antibodies were purified by protein A affinity chromatography using HiTrap MabSelect SuRe prepacked columns (GE Healthcare) and were subsequently buffer-exchanged. The products were evaluated by SDS-PAGE and SEC-HPLC to assess the heterodimeric yields.

[0470] In Fab-Fc/Fc one-armed construct system, the heterodimer and two homodimers have different size and molecular weight, facilitating the identification of the various pairings by SDS-PAGE electrophoresis and size-exclusion high-performance liquid chromatography (“SEC-HPLC”). Proteins were visualized electrophoretically under reducing and non-reducing conditions. Under reducing conditions, three bands were observed, corresponding to HC monomer, Fc monomer, and LC monomer. FIG. 6 shows that under non-reducing conditions there are three bands, corresponding to LC-HC homodimer, LC-HC-Fc heterodimer, and LC-HC half-body. Fc homodimer was not detected under these conditions. Heterodimer yield was also assessed by SEC-HPLC. As shown in FIG. 7, three peaks were detected overall. The first peak in the spectra corresponded to the homodimer, the second peak at 46.6 m corresponded to the heterodimer, and the third peak corresponds to the LC-HC half-body. Quantification of the peak areas in SEC-HPLC enabled identification of variant pairs that stabilize heterodimer relative to homodimer. Purity was calculated using the first peak and second peak, and the results are shown in Table 2.

TABLE 2
Heterodimer purity

| | Mutations | | |
|---|---|---|---|
| ID | ID | Mutations | Purity |
| TY52165 | TRF01 | T366S, L368A, Y407V, Y349C-T366′W, S354′C | 87 |
| TY52166 | TRF02 | T350V, L351Y F405A, Y407V-T350′V, T366′L, K392′L, T394′W | 98 |
| TY52187 | TRF03 | K196Q, S228P, F296Y, E356K, R409K, H435R, L445P-K196′Q, S228′P, | 40 |
| | | F296′Y, R409′K, K439E, L445′P | |
| TY52167 | TYM01 | T366S, L368A, Y407V, N390C-T366′W, S400′C | 69 |
| TY52168 | TYM02 | T366S, L368A, Y407V, S400C-T366′W, N390′C | 68 |
| TY52169 | TYM03 | Y349C, L368V, Y407V-S354′C, T366′W | 62 |
| TY52170 | TYM04 | L368V, Y407V-T366′W | 62 |
| TY52171 | TYM05 | L368V, Y407V, N390C-T366′W, S400′C | 91 |
| TY52172 | TYM06 | L368V, Y407V, S400C-T366′W, N390′C | NA |
| TY52180 | TYM07 | E357K:T411K-L351′D:K370′D | 31 |
| TY52181 | TYM08 | E357K:S364K-L351′D:K370′D | 31 |
| TY52182 | TYM09 | D356K:E357K:S364K-L351′D:K370′D:K439′D | 80 |
| TY52183 | TYM10 | E357K:S364K:N390C-L351′D:K370′D:S400′C | 54 |
| TY52184 | TYM11 | E357K:S364K:S400C-L351′D:K370′D:N390′C | 68 |
| TY52185 | TYM12 | D356K:E357K:S364K:N390C-L351′D:K370′D:S400′C:K439′D | 99 |
| TY52186 | TYM13 | D356K:E357K:S364K:S400C-L351′D:K370′D:N390′C:K439′D | 99 |

### Example 3. Heterodimer Stability Assessment

[0471] Further, the stability of the heterodimers was assessed by incubation under forced degradation conditions. Purified heterodimer samples were diluted into an appropriate buffer at 1 mg/mL and heated to a different temperature for 1 hour (FIG. 8), or incubated at 37° C. for up to 4 weeks (FIG. 9). The treated samples were analyzed by SEC-HPLC. FIG. 8 shows the different resistance of the proteins aggregation and precipitation at high temperature. The variations of SEC-HPLC spectra after storage at 37 C are shown in FIG. 9. Proteins TYM10, TYM11 and TYM013 showed a relatively superior stability.

### Example 4. Generation of Heterodimers Targeting CD137 and PDL1

[0472] Anti-CD137 and anti-PDL1 antibodies were used to construct bispecific antibodies with Fc mutations. The pharmacokinetics of monoclonal antibodies can be modulated by modifying their interactions with the neonatal Fc receptor FcRn. Improving the affinity of the FcRn-IgG interaction can extend the half-life of a modified IgG. FcRn binds to the Fc region of IgG in a strictly pH-dependent manner. At the physiological pH 7.4. FcRn does not bind IgG, but at the acidic pH of the endosome (pH 6-6.5), FcRn has a low micromolar to nanomolar affinity for the Fc region of IgG. FcRn binding characteristics can therefore reflect how the mutations affect PK of the Fc region. Table 3 illustrates that the pH-dependent FcRn binding of bispecific antibodies was not affected at both acidic and physiological pH.

TABLE 3
FcRn binding of bispecific antibodies

| | | pH | FcRn |
|---|---|---|---|
| | | dependent | binding at |
| | | FcRn | acidic |
| ID | Fc mutant | binding/% | pH/nM |
| TY21624 | TRF01 | −0.5 | 46.7 |
| TY21486 | TYM05 | 0.0 | 30.0 |
| TY21487 | TYM09 | 2.2 | 38.2 |
| TY21488 | TYM11 | 0.4 | 33.3 |
| TY21489 | TYM13 | 0.0 | 53.7 |
| TY21625 | TYM10 | 2.4 | 26.3 |

[0473] Anti-CD137 and anti-PDL1 antibodies with common light chains were used to construct bispecific antibodies with common light chains and different Fc mutations (FIG. 1B). The bispecific antibodies were also tested in a 293T-CD137-NFκB reporter assay. In brief, 50×10⁴/ml of 293T-CD137 cells and 50×10⁴/ml of 293T-PDL1 cells were mixed together, and the mixed cells were then split into wells of a 96-well plate at a density of 5×10⁴ cells/well (100 μl/well). 50 μl of diluted antibody solution was added into corresponding wells and incubated for 18 h. After incubation, the medium was aspirated and then 50 μl of Passive Lysis Buffer (Promega E1980) was added and incubated at 37° C. for 30 minutes. 20 μl supernatant was transferred to the white plate (Costar, 3912) and then 40 μl of firefly substrate and 40 μl of Renina substrate were added, and the luminescence signal was read (Promega E1980).

[0474] As shown in FIG. 10, TYM10 and TYM11 had relatively higher activities in the NFκB reporter assay.

### Example 5. Generation and Characterization of Bispecific Antibody Targeting CD137 and PDL1

### A. Generation of Bispecific Antibody

[0475] The following example describes the development of a developable and effective format for a bispecific antibody targeting CD137 and PDL1. The format was optimized on the basis of a “Morrison format” (FIG. 2). DNAs encoding anti-CD137 Fv and anti-PDL1 Fv were used to construct an expressing plasmid in the form of Fab or scFv. The scFv has a reduced affinity compared to Fab, so the orientation of the two Fvs (i.e., CD137×PDL1 or PDL1-CD137 in the form of Fab×scFv) could affect efficacy of the bispecific antibodies.

[0476] IgG1 or IgG4 (S228P) isotypes were employed. The scFv was linked to the C-terminus of the Fc in the VH-to-VL orientation by a linker of SGGGS (SEQ ID NO: 80) or GGGSGGGGS (SEQ ID NO: 81). Among the scFv, the C-terminus of VH was linked to the N-terminus of VL by a (G₄S)₄ (SEQ ID NO: 82) linker. A VH-44 to VL-100 disulfide bond was also incorporated into the scFv, designed to stabilize the format. A pair of novel engineered N390C_{CH3A}-S400′C_{CH3B} disulfide bonds in CH3 domain were also tested (SEQ ID NOs: 23-24). In addition, an N297A mutation was introduced to silence the effector function mediated by the Fc region. Table 4 provides the eight scaffold designs that were developed. Table 5 lists SEQ ID NOs. corresponding to the first heavy chain, first light chain, second heavy chain, second light chain of exemplary CD137×PDL1 and PDL1×CD137 antibodies.

TABLE 4
Scaffold designs for bispecific antibodies

| | | N390C: | | Fc-scFv | SEQ | scFv | scFv |
|---|---|---|---|---|---|---|---|
| Format | Isotype | S400′C | N297A | Linker | ID No. | Linker | Disulfide bond |
| TYF01 | IgG1 | No | No | SGGGS | 80 | (G₄S)₄ | VH44-VL100 |
| TYF02 | IgG1 | Yes | No | SGGGS | 80 | SEQ ID NO: 82 | |
| TYF03 | IgG1 | No | Yes | SGGGS | 80 | | |
| TYF04 | IgG1 | Yes | Yes | SGGGS | 80 | | |
| TYF05 | IgG1 | Yes | Yes | GGGSGGGGS | 81 | | |
| TYF06 | IgG4(S228P) | No | No | SGGGS | 80 | | |
| TYF07 | IgG4(S228P) | Yes | No | SGGGS | 80 | | |
| TYF08 | IgG4(S228P) | Yes | No | GGGSGGGGS | 81 | | |

### B. CMC Characterizations of Bispecific Antibody

[0477] Plasmids encoding heavy and light chains of bispecific antibodies were transiently transfected into mammalian cells. Bispecific antibody-containing cell culture supernatants were harvested 7 days after transfection by centrifugation at 14000 g for 30 min and were filtered through a sterile filter (0.22 μm). Antibodies were purified by protein A affinity chromatography using MabSelect SuRe prepacked columns (GE Healthcare) and were subsequently buffer exchanged in 20 mM histidine (pH 5.5) buffer.

[0478] The aggregation ratio of purified bispecific antibodies after purification was evaluated by analytical size-exclusion chromatography (“SEC”). The analysis was performed as follows: SEC was performed on a Waters 2695 combined with a Waters 2996 UV detector. A TSK Gel g3000 SWXL column (300 mm×7.8 mm) with a TSK Gel g3000 SWXL pre-column (Tosoh Bioscience) was used. 10 μg of each sample was injected and separation was performed at a flow rate of 0.5 mL/min. The elution buffer was composed of 200 mM sodium phosphate at pH 7.0. UV detection was performed at 214 nm. The freeze-thaw stability was studied by freezing 100 μL sample (1 mg/mL) at −80° C. for 30 min, followed by thawing at room temperature for 60 min. Six freeze-thaw cycles were conducted and the aggregation ratios were also determined by analytical size-exclusion chromatography.

[0479] Table 5 provides the yields of the bispecific antibodies after purification, and Table 6 provides aggregation ratios of the bispecific antibodies after purification and freeze-thaw. TYF05 was the best format, with low aggregation formation during expression and no aggregation tendency during freeze-thaw process. The disulfide bond in CH3 and the replacement of SGGGS (SEQ ID NO: 80) linker with a nine-amino-acid-linker GGGSGGGGS (SEQ ID NO: 81) both improved the colloidal stability.

TABLE 5
Yield of the bispecific antibodies after purification

| | PDL1 × CD137 bispecific antibody | | | CD137 × PDL1 bispecific antibody | | |
|---|---|---|---|---|---|---|
| | | Antibody | Yield after | | Antibody | Yield after |
| | | chain SEQ | purification | | chain SEQ | purification |
| Format | ID | ID NOs. | (mg/L) | ID | ID NOs. | (mg/L) |
| TYF01 | TY22121 | 84, 85 | 54.3 | TY22122 | 96, 97 | 45.4 |
| TYF02 | TY22148 | 86, 87 | 36.6 | TY22149 | 98, 99 | 42.2 |
| TYF03 | TY22172 | 88, 89 | 31.9 | TY22173 | 100, 101 | 47.7 |
| TYF04 | TY22176 | 90, 91 | 28.9 | TY22177 | 102, 103 | 21.6 |
| TYF05 | NA | | NA | TY22359 | 104, 105 | 30.5 |
| TYF06 | TY22161 | 92, 93 | 33.0 | TY22162 | 106, 107 | 31.0 |
| TYF07 | TY22165 | 94, 95 | 35.6 | TY22166 | 108, 109 | 39.3 |
| TYF08 | NA | | NA | TY22362 | 110, 111 | 26.7 |

TABLE 6
Aggregation ratios of the bispecific antibodies after purification and freeze-thaw

| | PDL1 × CD137 bispecific antibody | | | CD137 × PDL1 bispecific antibody | | |
|---|---|---|---|---|---|---|
| | (Aggregation ratio % ) | | | (Aggregation ratio %) | | |
| | | | After | | | after |
| | | After | freeze- | | after | freeze- |
| Formats | ID | purification | thaw | ID | purification | thaw |
| TYF01 | TY22121 | 2.1 | 9.1 | TY22122 | 8.4 | 10.8 |
| TYF02 | TY22148 | 1.7 | 5.4 | TY22149 | 4.5 | 8.5 |
| TYF03 | TY22172 | 2.6 | 3.8 | TY22173 | 10.2 | 9.3 |
| TYF04 | TY22176 | 3.3 | 4.6 | TY22177 | 5.1 | 7.6 |
| TYF05 | NA | NA | NA | TY22359 | 5.8 | 5.4 |
| TYF06 | TY22161 | 3.5 | 3.5 | TY22162 | 10.8 | 11.3 |
| TYF07 | TY22165 | 2.3 | 2.1 | TY22166 | 8.8 | 8.9 |
| TYF08 | NA | NA | NA | TY22362 | 7.8 | 8.2 |

[0480] Freeze and thaw for 6 cycles were tested by using purified proteins at 1 mg/mL, also incubated at 40° C. for 28 days (FIGS. 11A-11B). Four purified proteins were also heated at high temperature to confirm their thermal stability (FIG. 11C). FIGS. 11A-11B show the protein quality evaluated by analytical size-exclusion chromatography. All formats have little aggregation and degradation under accelerated storage condition that indicate they have a good long-term storage stability. As shown in FIG. 11C, all tested proteins aggregate and precipitate upon 60° C., and CD137×PDL1 bispecific antibody had a better colloidal stability than PDL1×CD137 bispecific antibody. These data pointed toward CD137×PDL1 as an antibody format most suitable for targeting CD137 and PDL1.

### C. Binding Affinity of Bispecific Antibody

[0481] Biacore T200 (GE Healthcare) was used as a high performance system for real-time biomolecular interaction analysis, using surface plasmon resonance technology (“SPR”). During the measurement, anti-human IgG monoclonal antibody from the Human Antibody Capture Kit provided by Biacore was immobilized on CM5 chips, and IgG sample was injected onto sensor chip. Analytes were injected onto IgG captured flow cell for binding kinetic analysis in HBS-EP buffer. The data was fitted according to 1:1 Langmuir model and the K_{D} value determined (Table 7). Format 5 had the highest affinity among all bispecific antibodies.

[0482] The affinity of antibodies was also assessed against human, monkey and mouse CD137 or PDL1 that were transiently expressed on the surface of yeast or HEK293F cells. Briefly, yeast or HEK293F cells were transfected with a plasmid expressing human, monkey or mouse CD137 or PDL1. After 48 hours, the transfected cells were harvested and then washed. Cells were then incubated with IgGs (each at 100 nM) at 4° C. in the shaking bed for 1 hour shaking at 300 rpm, protected from light. For simultaneously binding, cell were incubated with biotinylated human CD137 or PDL1 protein fused with human Fc fragment, and SA-PE (streptavidin, phycoerythrin conjugated). For cross-reactivity, cells were incubated with Alexa Fluor 647 conjugated mouse anti-human Fc antibodies. The mixtures were incubated at 4° C. in the shaking bed for 30 minutes shaking at 300 rpm, protected from light. The cells were washed once prior to analysis by flow cytometry (Beckman CytoFlex). FIG. 12 shows that the bispecific antibody simultaneously binds human PDL1 and CD137. In addition, FIG. 13 shows that the bispecific antibodies maintained parental cross-reactivity with PDL1 or CD137 of human, mouse, or monkey origin.

TABLE 7
Binding affinity to PDL1H and CD137H

| | PDL1 × CD137 bispecific antibody | | | CD137 × PDL1 bispecific antibody | | |
|---|---|---|---|---|---|---|
| | | Human | Human | | Human | Human |
| | | PDL1 | CD 137 | | PDL1 | CD137 |
| Formats | ID | (nM) | (nM) | ID | (nM) | (nM) |
| TYF01 | TY22121 | 6.9 | 14.1 | TY22122 | 29.7 | 3.8 |
| TYF02 | TY22148 | 7.7 | 6.7 | TY22149 | 32.0 | 2.4 |
| TYF04 | TY22176 | 8.1 | 7.1 | TY22177 | 33.4 | 7.0 |
| TYF05 | NA | NA | NA | TY22359 | 29.8 | 2.7 |
| TYF07 | TY22165 | 7.7 | 5.2 | TY22166 | 42.0 | 3.0 |
| TYF08 | NA | NA | NA | TY22362 | 40.3 | 2.8 |

### D. In Vitro and In Vivo Efficacy

[0483] The effect of PDL1×CD137 and CD137×PDL1 bispecific antibodies on in vitro reporter gene assays was tested (FIG. 14). Anti-PDL1-based bispecific antibodies were assessed by PDL1 blockade bioassay. In brief, Jurkat T cells expressing human PD-1 and a luciferase reporter driven by an NFAT response element (NFAT-RE) were used as PD-1 effector cells. CHO-K1 cells expressing human PDL1 and an engineered cell surface protein designed to activate cognate TCRs in an antigen-independent manner were used as PDL1 aAPC/CHO-K1 cells. PD-1 effector cells were incubated with PDL1 aAPC/CHO-K1 cells in the absence or presence of anti-PDL1-based bispecific antibodies or PDL1 monomer blocking antibody, as indicated in FIG. 14. BIO-GLO™ Reagent was added and luminescence quantified. Data were analyzed using GraphPad Prism® software. Anti-CD137-based bispecific antibodies were assessed by NFκB reporter assay. CD137-NFκB-293T stable cells were restored, cultured and split to the 96-well plate (50 μL/well, at density of 6×10⁵). After 5.5 hours of incubation, diluted test antibodies (indicated in FIG. 14) premixed at 1:5 ratio with a crosslinker were added. Luciferase levels were measured 18 hours later. Relative luciferase units (RLU) against the blank control (without antibody treatment) were normalized for transfection efficiency using Renilla luciferase activity and the results were expressed as mean±standard error in triplicate.

[0484] As shown in the top panel of FIG. 14, In PDL1 reporter gene assays show that PDL1×CD137 bispecific antibody had similar activity with PDL1 monomer, and both were stronger than CD137×PDL1 bispecific antibody. Similarly, in the bottom panel of FIG. 14, a CD137 reporter gene assay, CD137×PDL1 bispecific antibody had stronger activity than PDL1×CD137 bispecific antibody. These results indicated that Fab had better activity than scFv. Without wishing to be bound by theory, this may have been because of the difference in affinities.

[0485] Because the anti-CD137 and anti-PDL1 Fv cross-reacted with mouse and monkey antigens, the in vivo efficacy of bispecific antibodies was studied in the 3LL syngeneic mouse tumor model (FIGS. 15A-15C). Both PDL1×CD137 and CD137×PDL1 bispecific antibodies inhibited tumor growth. CD137×PDL1 bispecific antibody was slightly less efficacious than the combination of CD137 and PDL1 parental antibodies, and much more efficacious than one of the two parental antibodies alone. The PDL1×CD137 bispecific antibody was not as effective as the CD137×PDL1 antibody, indicating that the orientation of the two antigens in this bispecific format is important for efficacy.

### Example 6. Generation of Trispecific Antibodies

[0486] The following example provides trispecific antibodies capable of binding CD137, PDL1, and CTLA4 (FIG. 3).

[0487] Three trispecific antibodies combining Fc mutant TYM11 and bispecific formats TYF01, TYF02 and TYF04 were constructed and purified, as shown in Table 8. TYF02 showed the best quality and all the three formats were stable under freeze-thaw and 40° C. storage.

[0488] Anti-CD137 and anti-PDL1 Fv cross-reacted with mouse and monkey antigens, so the in vivo efficacy of bispecific antibodies was studied in the 3LL syngeneic mouse tumor model. C57BL/6 mice were transplanted subcutaneously with 2×10⁶ 3LL lung cancer cells. When the tumors were established (70 mm³), treatment began with isotype control IgG (n=6), PDL1×CD137 bispecific (10 mg/kg, n=8). CD137×PDL1 bispecific (10 mg/kg, n=8), CD137 monomer (7.5 mg/kg, n=6), PDL1 monomer (7.5 mg/kg, n=6) or CD137 monomer+PDL1 monomer (both 7.5 mg/kg, n=8) by intraperitoneal injection, for up to 6 doses. Tumor growth was monitored thrice weekly and reported as mean tumor volume±SEM over time. As shown in FIGS. 15A-15B, both PDL1×CD137 and CD137×PDL1 bispecific antibodies inhibited tumor growth. CD137×PDL1 bispecific antibody was slightly less efficacious than the combination of CD137 and PDL1 parental antibodies, and much more efficacious than one of the two parental antibodies alone. The PDL1×CD137 bispecific antibody was not as effective as the CD137×PDL1 antibody, indicating that the orientation of the two antigens in this bispecific format is important for efficacy.

[0489] The TYF02 trispecific antibody was also chosen to test in vivo efficacy using the 3LL syngeneic mouse tumor model. C57BL/6 mice were transplanted subcutaneously with 2×10⁶ 3LL lung cancer cells. When the tumors were established (65 mm³), treatment began with isotype control IgG (n=6), CD137×PDL1×CTLA4 trispecific (10 mg/kg, n=8). CD137×PDL1×CTLA4 trispecific (5 mg/kg, n=8), CD137×PDL1 bispecific (10 mg/kg, n=6), CD137×CTLA4 bispecific (10 mg/kg, n=6), CD137 monomer (7.5 mg/kg, n=6). PDL1 (3.75 mg/kg, n=6), CTLA4 (3.75 mg/kg, n=6) or CD137 monomer (7.5 mg/kg)+PDL1 (3.75 mg/kg)+CTLA4 (3.75 mg/kg) (n=6) by intraperitoneal injection, for up to 5 doses. Tumor growth was monitored every two days and reported as mean tumor volume f SEM over time. As shown in FIG. 15C, this trispecific antibody showed better tumor growth inhibition than the corresponding bispecific antibodies or the parental combination of three mono-IgGs.

TABLE 8
Trispecific antibody chemistry, manufacturing and controls

| | | | Antibody | Yield after | | |
|---|---|---|---|---|---|---|
| | | Fc | chain SEQ | purification | QC | QC |
| ID | Format | mutant | ID NOs. | mg/L | HMW(%) | LMW % |
| TY22224 | TYF01 | TYM11 | 118-120 | 28.1 | 2.4 | 6.7 |
| TY22225 | TYF02 | TYM11 | 121-123 | 18.8 | 2.0 | 1.3 |
| TY22226 | TYF04 | TYM11 | 124-126 | 9.9 | 0.9 | 0.3 |

### Example 7. Biophysical Characterization of Heterodimeric HER2×CD3 T-Cell-Engaging Bispecific Antibody

[0490] A heterodimeric bispecific scaffold was designed using the TYM13 Fc mutant. A light chain-heavy chain half antibody and a scFv-Fc chain were combined to form a bispecific antibody, with TYM13 mutations in hetero-Fc domain (FIG. 4). A HER2×CD3 bispecific T-cell-engaging antibody was constructed using this scaffold. For comparison, corresponding antibodies having knobs-into-holes mutations Y394C, T366S, L368A, Y407V-S354′C T366′W and “Xencor mutations” E357Q, S364K-L368′D, K370'S were also constructed.

[0491] Plasmids encoding the heavy chain, light chain, and scFv-Fc chain of bispecific antibodies were transiently transfected into mammalian cells. Bispecific antibody-containing cell culture supernatants were harvested 7 days after transfection by centrifugation at 14000 g for 30 min and were filtered through a sterile filter (0.22 μm). Antibodies were purified by protein A affinity chromatography using MabSelect SuRe prepacked columns (GE Healthcare) and were subsequently buffer exchanged in 20 mM histidine (pH 5.5) buffer.

[0492] The biophysical purity of heterodimeric bispecific antibodies was assessed through SEC-HPLC and SDS-PAGE. As shown in FIG. 16 and FIG. 17, TY24051 with TYM13 mutations showed very good heterodimeric purity, with no detectable homodimers, while TY24105 and TY24106, with knobs-into-holes and Xencor mutation, both contained some 150 kDa homodimers (indicated in SDS-PAGE and SEC-HPLC graphs in FIG. 16 and FIG. 17, respectively). Furthermore, TY24051 contained fewer aggregates than TY24105 and TY24106.

[0493] When TY24051 was converted into an activatable antibody, TY24052, some aggregates were generated (see Table 9). TY24052 could be purified by cation exchange chromatography (CEX).

TABLE 9
Bispecific antibodies and their SEC-HPLC purity

| | | Antibody | SEC-HPLC purity | | |
|---|---|---|---|---|---|
| | | chain SEQ | HMW | Monomer | LMW |
| IgG ID | Fc mutant | ID NOs. | (%) | (%) | (%) |
| TY24051 | TYM13 | 112, 113, | 3.1 | 96.0 | 0.9 |
| | | 114 | | | |
| TY24105 | Knobs-into-holes | — | 9.2 | 89.2 | 1.5 |
| TY24106 | Xencor mutation | — | 31.6 | 68.2 | 0.2 |

### Example 8. Activatable Bispecific Antibody Construction and Functional Characterization

[0494] An activatable HER2×CD3 bispecific antibody (also referred herein as “SAFEbody” or “SAFE-bispecific”) was constructed (FIG. 5). The constructs are described in Tables 10 and 11.

TABLE 10
Bispecific antibodies and their purity determined by SEC-HPLC

| | | Antibody | SEC-HPLC purity | | |
|---|---|---|---|---|---|
| | | chain SEQ | HMW | Monomer | LMW |
| IgG ID | Format | ID NOs. | (%) | (%) | (%) |
| TY24051 | TYM13 N297A | 112, 113, | 3.1 | 96.0 | 0.9 |
| | | 114 | | | |
| TY24052 | TYM13 N297A, | 115, 116, | 9.3 | 88.2 | 2.5 |
| | SAFE-bispecific | 117 | | | |

TABLE 11
Design of HER2 × CD3 bispecific SAFEbody

| | | | | | Fc | |
|---|---|---|---|---|---|---|
| | SAFEbody | | | Cleavable | heterodimeric | Fc |
| IgG ID | Motifs | Left Arm | Right Arm | activation | motif | effector |
| TY24051 | Parental | Fab | scFv | NA | TYM13 | N297A |
| | bispecific | (HER2) | (CD3) | | | |
| | Fab X scFv | | | | | |
| | in IgG1 | | | | | |
| TY24052 | Safe | SAFE | SAFE | Cleavable | TYM13 | N297A |
| | Bispecific | Fab | scFv | | | |
| | Fab X scFv | (HER2) | (CD3) | | | |
| | in IgG1 | | | | | |
| TY24053 | Safe | SAFE | SAFE | Non | TYM13 | N297A |
| | Bispecific | Fab | scFv | cleavable | | |
| | Fab X scFv | (HER2) | (CD3) | | | |
| | in IgG1 | | | | | |

[0495] The affinities of the bispecific antibody (TY24051) and its SAFEbody version (TY24052) were analyzed through enzyme-linked immunosorbent assay (ELISA) assay. 2 μg/mL of human HER2 or CD3 (E and 6 chain heterodimer) fused with human Fc fragment, were prepared and used to coat the ELISA plate at 2-8′C overnight. After washing and blocking, 50 μL serial diluted IgGs were added and incubated at 37′C for 1 hour. Plates were washed three times and then incubated with 50 μL/well TMB substrate at room temperature for about 20 minutes. Absorbance at 450 nm was measured after the reaction was stopped. The data was analyzed by GraphPad Prism 6 with nonlinear fitting. As shown in FIGS. 18A-18B, TY24051 bound to both HER2 and CD3, while TY24052 showed an apparently lower affinity than TY24051. After activation, the affinity of TY24052 was fully recovered.

[0496] To compare functional activity between TY24051 and TY24052, the antibodies were expressed, purified and evaluated for antigen-dependent bispecific antibody-mediated tumor cell killing activity (FIG. 19). For in vitro cytotoxicity assays, näive human pan-T-cells were isolated from fresh human blood and mixed with HER2-positive tumor cells (SKOV3) along with increasing amounts of bispecific antibody for 24 hours (target cells: 1×10⁴ cells/well, E:T=10:1). As show in FIG. 19, dose dependent killing was observed for TY24051 and TY24052, and TY24052 showed about 800-fold increase the EC₅₀, compared with TY24051. No specific killing was observed with isotype control.

The application's sequence listing, which the Patent Office published only in electronic form, follows.

SEQUENCE LISTING (365 sequences)

SEQ ID NO: 1 - protein, 107 aa, Artificial Sequence
  IgG1_FC1_CH3_T366S,L368A,Y407V,N390C
GQPREPQVYTLPPSRDELTKNQVSLSCAVKGFYPSDIAVEWESNGQPENCYKTTPPVLDSDGSFFLVSKLTVDKSRWQQGNVFSCSVMHEALHNHYTQKSLSLSPGK

SEQ ID NO: 2 - protein, 107 aa, Artificial Sequence
  IgG1_FC2_ CH3_T366'W,S400'C
GQPREPQVYTLPPSRDELTKNQVSLWCLVKGFYPSDIAVEWESNGQPENNYKTTPPVLDCDGSFFLYSKLTVDKSRWQQGNVFSCSVMHEALHNHYTQKSLSLSPGK

SEQ ID NO: 3 - protein, 107 aa, Artificial Sequence
  IgG1_FC1_ CH3_T366S,L368A,Y407V,S400C
GQPREPQVYTLPPSRDELTKNQVSLSCAVKGFYPSDIAVEWESNGQPENNYKTTPPVLDCDGSFFLVSKLTVDKSRWQQGNVFSCSVMHEALHNHYTQKSLSLSPGK

SEQ ID NO: 4 - protein, 107 aa, Artificial Sequence
  IgG1_FC2_ CH3_T366'W,N390'C
GQPREPQVYTLPPSRDELTKNQVSLWCLVKGFYPSDIAVEWESNGQPENCYKTTPPVLDSDGSFFLYSKLTVDKSRWQQGNVFSCSVMHEALHNHYTQKSLSLSPGK

SEQ ID NO: 5 - protein, 107 aa, Artificial Sequence
  IgG1_FC1_ CH3_L368V,Y407V,N390C
GQPREPQVYTLPPSRDELTKNQVSLTCVVKGFYPSDIAVEWESNGQPENCYKTTPPVLDSDGSFFLVSKLTVDKSRWQQGNVFSCSVMHEALHNHYTQKSLSLSPGK

SEQ ID NO: 6 - protein, 107 aa, Artificial Sequence; identical to SEQ ID NO: 2
  IgG1_FC2_ CH3_T366'W,S400'C

SEQ ID NO: 7 - protein, 107 aa, Artificial Sequence
  IgG1_FC1_ CH3_L368V,Y407V,S400C
GQPREPQVYTLPPSRDELTKNQVSLTCVVKGFYPSDIAVEWESNGQPENNYKTTPPVLDCDGSFFLVSKLTVDKSRWQQGNVFSCSVMHEALHNHYTQKSLSLSPGK

SEQ ID NO: 8 - protein, 107 aa, Artificial Sequence; identical to SEQ ID NO: 4
  IgG1_FC2_ CH3_T366'W,N390'C

SEQ ID NO: 9 - protein, 107 aa, Artificial Sequence
  IgG1_FC1_ CH3_E357K:T411K
GQPREPQVYTLPPSRDKLTKNQVSLTCLVKGFYPSDIAVEWESNGQPENNYKTTPPVLDSDGSFFLYSKLKVDKSRWQQGNVFSCSVMHEALHNHYTQKSLSLSPGK

SEQ ID NO: 10 - protein, 107 aa, Artificial Sequence
  IgG1_FC2_ CH3_L351'D:K370'D
GQPREPQVYTDPPSRDELTKNQVSLTCLVDGFYPSDIAVEWESNGQPENNYKTTPPVLDSDGSFFLYSKLTVDKSRWQQGNVFSCSVMHEALHNHYTQKSLSLSPGK

SEQ ID NO: 11 - protein, 107 aa, Artificial Sequence
  IgG1_FC1_ CH3_E357K:S364K
GQPREPQVYTLPPSRDKLTKNQVKLTCLVKGFYPSDIAVEWESNGQPENNYKTTPPVLDSDGSFFLYSKLTVDKSRWQQGNVFSCSVMHEALHNHYTQKSLSLSPGK

SEQ ID NO: 12 - protein, 107 aa, Artificial Sequence; identical to SEQ ID NO: 10
  IgG1_FC2_ CH3_L351'D:K370'D

SEQ ID NO: 13 - protein, 107 aa, Artificial Sequence
  IgG1_FC1_ CH3_D356K:E357K:S364K
GQPREPQVYTLPPSRKKLTKNQVKLTCLVKGFYPSDIAVEWESNGQPENNYKTTPPVLDSDGSFFLYSKLTVDKSRWQQGNVFSCSVMHEALHNHYTQKSLSLSPGK

SEQ ID NO: 14 - protein, 107 aa, Artificial Sequence
  IgG1_FC2_ CH3_L351'D:K370'D:K439'D
GQPREPQVYTDPPSRDELTKNQVSLTCLVDGFYPSDIAVEWESNGQPENNYKTTPPVLDSDGSFFLYSKLTVDKSRWQQGNVFSCSVMHEALHNHYTQDSLSLSPGK

SEQ ID NO: 15 - protein, 107 aa, Artificial Sequence
  IgG1_FC1_ CH3_E357K:S364K:N390C
GQPREPQVYTLPPSRDKLTKNQVKLTCLVKGFYPSDIAVEWESNGQPENCYKTTPPVLDSDGSFFLYSKLTVDKSRWQQGNVFSCSVMHEALHNHYTQKSLSLSPGK

SEQ ID NO: 16 - protein, 107 aa, Artificial Sequence
  IgG1_FC2_ CH3_L351'D:K370'D:S400'C
GQPREPQVYTDPPSRDELTKNQVSLTCLVDGFYPSDIAVEWESNGQPENNYKTTPPVLDCDGSFFLYSKLTVDKSRWQQGNVFSCSVMHEALHNHYTQKSLSLSPGK

SEQ ID NO: 17 - protein, 107 aa, Artificial Sequence
  IgG1_FC1_ CH3_E357K:S364K:S400C
GQPREPQVYTLPPSRDKLTKNQVKLTCLVKGFYPSDIAVEWESNGQPENNYKTTPPVLDCDGSFFLYSKLTVDKSRWQQGNVFSCSVMHEALHNHYTQKSLSLSPGK

SEQ ID NO: 18 - protein, 107 aa, Artificial Sequence
  IgG1_FC2_ CH3_L351'D:K370'D:N390'C
GQPREPQVYTDPPSRDELTKNQVSLTCLVDGFYPSDIAVEWESNGQPENCYKTTPPVLDSDGSFFLYSKLTVDKSRWQQGNVFSCSVMHEALHNHYTQKSLSLSPGK

SEQ ID NO: 19 - protein, 107 aa, Artificial Sequence
  IgG1_FC1_ CH3_D356K:E357K:S364K:N390C
GQPREPQVYTLPPSRKKLTKNQVKLTCLVKGFYPSDIAVEWESNGQPENCYKTTPPVLDSDGSFFLYSKLTVDKSRWQQGNVFSCSVMHEALHNHYTQKSLSLSPGK

SEQ ID NO: 20 - protein, 107 aa, Artificial Sequence
  IgG1_FC2_ CH3_L351'D:K370'D:S400'C:K439'D
GQPREPQVYTDPPSRDELTKNQVSLTCLVDGFYPSDIAVEWESNGQPENNYKTTPPVLDCDGSFFLYSKLTVDKSRWQQGNVFSCSVMHEALHNHYTQDSLSLSPGK

SEQ ID NO: 21 - protein, 107 aa, Artificial Sequence
  IgG1_FC1_ CH3_D356K:E357K:S364K:S400C
GQPREPQVYTLPPSRKKLTKNQVKLTCLVKGFYPSDIAVEWESNGQPENNYKTTPPVLDCDGSFFLYSKLTVDKSRWQQGNVFSCSVMHEALHNHYTQKSLSLSPGK

SEQ ID NO: 22 - protein, 107 aa, Artificial Sequence
  IgG1_FC2_ CH3_L351'D:K370'D:N390'C:K439'D
GQPREPQVYTDPPSRDELTKNQVSLTCLVDGFYPSDIAVEWESNGQPENCYKTTPPVLDSDGSFFLYSKLTVDKSRWQQGNVFSCSVMHEALHNHYTQDSLSLSPGK

SEQ ID NO: 23 - protein, 107 aa, Artificial Sequence
  IgG1_FC1_CH3_S400C
GQPREPQVYTLPPSRDELTKNQVSLTCLVKGFYPSDIAVEWESNGQPENNYKTTPPVLDCDGSFFLYSKLTVDKSRWQQGNVFSCSVMHEALHNHYTQKSLSLSPGK

SEQ ID NO: 24 - protein, 107 aa, Artificial Sequence
  IgG1_FC2_CH3_N390'C
GQPREPQVYTLPPSRDELTKNQVSLTCLVKGFYPSDIAVEWESNGQPENCYKTTPPVLDSDGSFFLYSKLTVDKSRWQQGNVFSCSVMHEALHNHYTQKSLSLSPGK

SEQ ID NO: 25 - protein, 107 aa, Artificial Sequence
  IgG1_FC1_CH3_K392C
GQPREPQVYTLPPSRDELTKNQVSLTCLVKGFYPSDIAVEWESNGQPENNYCTTPPVLDSDGSFFLYSKLTVDKSRWQQGNVFSCSVMHEALHNHYTQKSLSLSPGK

SEQ ID NO: 26 - protein, 107 aa, Artificial Sequence
  IgG1_FC2_CH3_V397'C
GQPREPQVYTLPPSRDELTKNQVSLTCLVKGFYPSDIAVEWESNGQPENNYKTTPPCLDSDGSFFLYSKLTVDKSRWQQGNVFSCSVMHEALHNHYTQKSLSLSPGK

SEQ ID NO: 27 - protein, 107 aa, Artificial Sequence; identical to SEQ ID NO: 25
  IgG1_FC1_CH3_K392C

SEQ ID NO: 28 - protein, 107 aa, Artificial Sequence; identical to SEQ ID NO: 23
  IgG1_FC2_CH3_S400'C

SEQ ID NO: 29 - protein, 107 aa, Artificial Sequence
  IgG1_WT_CH3_356D,358L
GQPREPQVYTLPPSRDELTKNQVSLTCLVKGFYPSDIAVEWESNGQPENNYKTTPPVLDSDGSFFLYSKLTVDKSRWQQGNVFSCSVMHEALHNHYTQKSLSLSPGK

SEQ ID NO: 30 - protein, 107 aa, Artificial Sequence
  IgG1_WT_CH3_356E,358M
GQPREPQVYTLPPSREEMTKNQVSLTCLVKGFYPSDIAVEWESNGQPENNYKTTPPVLDSDGSFFLYSKLTVDKSRWQQGNVFSCSVMHEALHNHYTQKSLSLSPGK

SEQ ID NO: 31 - protein, 107 aa, Artificial Sequence
  IgG4_WT_CH3
GQPREPQVYTLPPSQEEMTKNQVSLTCLVKGFYPSDIAVEWESNGQPENNYKTTPPVLDSDGSFFLYSRLTVDKSRWQEGNVFSCSVMHEALHNHYTQKSLSLSLGK

SEQ ID NO: 32 - protein, 330 aa, Artificial Sequence [sequence omitted]

SEQ ID NO: 33 - protein, 330 aa, Artificial Sequence
  IgG1_WT 356E,358M
ASTKGPSVFPLAPSSKSTSGGTAALGCLVKDYFPEPVTVSWNSGALTSGVHTFPAVLQSSGLYSLSSVVTVPSSSLGTQTYICNVNHKPSNTKVDKKVEPKSCDKTHTCPPCPAPELLGGPSVFLFPPKPKDTLMISRTPEVTCVVVDVSHEDPEVKFNWYVDGVEVHNAKTKPREEQYNSTYRVVSVLTVLHQDWLNGKEYKCKVSNKALPAPIEKTISKAKGQPREPQVYTLPPSREEMTKNQVSLTCLVKGFYPSDIAVEWESNGQPENNYKTTPPVLDSDGSFFLYSKLTVDKSRWQQGNVFSCSVMHEALHNHYTQKSLSLSPGK

SEQ ID NO: 34 - protein, 327 aa, Artificial Sequence
  IgG4_WT
ASTKGPSVFPLAPCSRSTSESTAALGCLVKDYFPEPVTVSWNSGALTSGVHTFPAVLQSSGLYSLSSVVTVPSSSLGTKTYTCNVDHKPSNTKVDKRVESKYGPPCPSCPAPEFLGGPSVFLFPPKPKDTLMISRTPEVTCVVVDVSQEDPEVQFNWYVDGVEVHNAKTKPREEQFNSTYRVVSVLTVLHQDWLNGKEYKCKVSNKGLPSSIEKTISKAKGQPREPQVYTLPPSQEEMTKNQVSLTCLVKGFYPSDIAVEWESNGQPENNYKTTPPVLDSDGSFFLYSRLTVDKSRWQEGNVFSCSVMHEALHNHYTQKSLSLSLGK

SEQ ID NO: 35 - protein, 21 aa, Artificial Sequence
  CD3 MM
EVGSYPYDDPDCPSHDSDCDN

SEQ ID NO: 36 - protein, 24 aa, Artificial Sequence
  HER2 MM
ESDACDADPFDCQAGGGGSGSGGS

SEQ ID NO: 37 - protein, 10 aa, Artificial Sequence
  Synthetic Construct
YSISSGYYWG

SEQ ID NO: 38 - protein, 18 aa, Artificial Sequence
  Synthetic Construct
GIIYPSGGGTNYAQKFQG

SEQ ID NO: 39 - protein, 8 aa, Artificial Sequence
  Synthetic Construct
GGGLGFDY

SEQ ID NO: 40 - protein, 11 aa, Artificial Sequence
  Synthetic Construct
RASQSIPSFLN

SEQ ID NO: 41 - protein, 7 aa, Artificial Sequence
  Synthetic Construct
AASSLQS

SEQ ID NO: 42 - protein, 11 aa, Artificial Sequence
  Synthetic Construct
QHYISWPRQFT

SEQ ID NO: 43 - protein, 118 aa, Artificial Sequence
  Anti-PD-L1_VH
EVQLVESGGGLVQPGGSLRLSCAASGYSISSGYYWGWIRQAPGKGLEWIGIIYPSGGGTNYAQKFQGRVTISRDNSKNTLYLQLNSLRAEDTAVYYCARGGGLGFDYWGQGTLVTVSS

SEQ ID NO: 44 - protein, 110 aa, Artificial Sequence
  Anti-PD-L1_VL
DIQLTQSPSSLSASVGDRVTITCRASQSIPSFLNWYQQKPGKAPKLLIYAASSLQSGVPSRFSGSGSGTDFTLTISSLQPEDFATYYCQHYISWPRQFTFGQGTKVEIKR

SEQ ID NO: 45 - protein, 11 aa, Artificial Sequence
  Synthetic Construct
FSLSTGGVGVG

SEQ ID NO: 46 - protein, 17 aa, Artificial Sequence
  Synthetic Construct
ALIDWADDKYYSPSLKS

SEQ ID NO: 47 - protein, 13 aa, Artificial Sequence
  Synthetic Construct
GGSDTVIGDWFAY

SEQ ID NO: 48 - protein, 11 aa, Artificial Sequence
  Synthetic Construct
RASQSIGSYLA

SEQ ID NO: 49 - protein, 7 aa, Artificial Sequence
  Synthetic Construct
DASNLET

SEQ ID NO: 50 - protein, 8 aa, Artificial Sequence
  Synthetic Construct
QQGYYLWT

SEQ ID NO: 51 - protein, 123 aa, Artificial Sequence
  Anti-CD137_VH
EVQLVESGGGLVQPGGSLRLSCAASGFSLSTGGVGVGWIRQAPGKGLEWLALIDWADDKYYSPSLKSRLTISRDNSKNTLYLQLNSLRAEDTAVYYCARGGSDTVIGDWFAYWGQGTLVTVSS

SEQ ID NO: 52 - protein, 107 aa, Artificial Sequence
  Anti-CD137_VL
DIQLTQSPSSLSASVGDRVTITCRASQSIGSYLAWYQQKPGKAPKLLIYDASNLETGVPSRFSGSGSGTDFTLTISSLQPEDFATYYCQQGYYLWTFGQGTKVEIKR

SEQ ID NO: 53 - protein, 10 aa, Artificial Sequence
  Synthetic Construct
YSISSGYHWS

SEQ ID NO: 54 - protein, 17 aa, Artificial Sequence
  Synthetic Construct
ARIDWDDDKYYSTSLKS

SEQ ID NO: 55 - protein, 7 aa, Artificial Sequence
  Synthetic Construct
SYVYFDY

SEQ ID NO: 56 - protein, 12 aa, Artificial Sequence
  Synthetic Construct
RASQSVRGRFLA

SEQ ID NO: 57 - protein, 7 aa, Artificial Sequence
  Synthetic Construct
DASNRAT

SEQ ID NO: 58 - protein, 9 aa, Artificial Sequence
  Synthetic Construct
QQSSSWPPT

SEQ ID NO: 59 - protein, 116 aa, Artificial Sequence
  Anti-CTLA4_VH
EVQLVESGGGLVQPGGSLRLSCAASGYSISSGYHWSWIRQAPGKGLEWLARIDWDDDKYYSTSLKSRLTISRDNSKNTLYLQLNSLRAEDTAVYYCARSYVYFDYWGQGTLVTVSS

SEQ ID NO: 60 - protein, 109 aa, Artificial Sequence
  Anti-CTLA4_VL
DIQLTQSPSSLSASVGDRVTITCRASQSVRGRFLAWYQQKPGKAPKLLIYDASNRATGIPSRFSGSGSGTDFTLTISSLQPEDFATYYCQQSSSWPPTFGQGTKVEIKR

SEQ ID NO: 61 - protein, 9 aa, Artificial Sequence
  Synthetic Construct
FTFNTYAMN

SEQ ID NO: 62 - protein, 20 aa, Artificial Sequence
  Synthetic Construct
GRIRSKYNNYATYYADSVKG

SEQ ID NO: 63 - protein, 14 aa, Artificial Sequence
  Synthetic Construct
HGNFGNSYVSWFAY

SEQ ID NO: 64 - protein, 14 aa, Artificial Sequence
  Synthetic Construct
GSSTGAVTTSNYAN

SEQ ID NO: 65 - protein, 7 aa, Artificial Sequence
  Synthetic Construct
GTNKRAP

SEQ ID NO: 66 - protein, 7 aa, Artificial Sequence
  Synthetic Construct
WYSNLWV

SEQ ID NO: 67 - protein, 125 aa, Artificial Sequence
  Anti-CD3_VH
EVQLVESGGGLVQPGGSLRLSCAASGFTFNTYAMNWVRQAPGKGLEWVGRIRSKYNNYATYYADSVKGRFTISRDDSKNTLYLQMNSLRAEDTAVYYCVRHGNFGNSYVSWFAYWGQGTLVTVSS

SEQ ID NO: 68 - protein, 109 aa, Artificial Sequence
  Anti-CD3_VL
QAVVTQEPSLTVSPGGTVTLTCGSSTGAVTTSNYANWVQQKPGQAPRGLIGGTNKRAPGVPARFSGSLLGGKAALTLSGAQPEDEAEYYCALWYSNLWVFGGGTKLTVL

SEQ ID NO: 69 - protein, 9 aa, Artificial Sequence
  Synthetic Construct
FNIKDTYIH

SEQ ID NO: 70 - protein, 18 aa, Artificial Sequence
  Synthetic Construct
ARIYPTNGYTRYADSVKG

SEQ ID NO: 71 - protein, 11 aa, Artificial Sequence
  Synthetic Construct
WGGDGFYAMDY

SEQ ID NO: 72 - protein, 11 aa, Artificial Sequence
  Synthetic Construct
RASQDVNTAVA

SEQ ID NO: 73 - protein, 7 aa, Artificial Sequence
  Synthetic Construct
SASFLYS

SEQ ID NO: 74 - protein, 9 aa, Artificial Sequence
  Synthetic Construct
QQHYTTPPT

SEQ ID NO: 75 - protein, 120 aa, Artificial Sequence [sequence omitted]

SEQ ID NO: 76 - protein, 108 aa, Artificial Sequence
  Anti-Her2_VL
DIQMTQSPSSLSASVGDRVTITCRASQDVNTAVAWYQQKPGKAPKLLIYSASFLYSGVPSRFSGSRSGTDFTLTISSLQPEDFATYYCQQHYTTPPTFGQGTKVEIKR

SEQ ID NO: 77 - protein, 248 aa, Artificial Sequence
  Synthetic Construct
EVQLVESGGGLVQPGGSLRLSCAASGYSISSGYYWGWIRQAPGKGLEWIGIIYPSGGGTNYAQKFQGRVTISRDNSKNTLYLQLNSLRAEDTAVYYCARGGGLGFDYWGQGTLVTVSSGGGGSGGGGSGGGGSGGGGSDIQLTQSPSSLSASVGDRVTITCRASQSIPSFLNWYQQKPGKAPKLLIYAASSLQSGVPSRFSGSGSGTDFTLTISSLQPEDFATYYCQHYISWPRQFTFGQGTKVEIKR

SEQ ID NO: 78 - protein, 250 aa, Artificial Sequence
  Synthetic Construct
EVQLVESGGGLVQPGGSLRLSCAASGFSLSTGGVGVGWIRQAPGKGLEWLALIDWADDKYYSPSLKSRLTISRDNSKNTLYLQLNSLRAEDTAVYYCARGGSDTVIGDWFAYWGQGTLVTVSSGGGGSGGGGSGGGGSGGGGSDIQLTQSPSSLSASVGDRVTITCRASQSIGSYLAWYQQKPGKAPKLLIYDASNLETGVPSRFSGSGSGTDFTLTISSLQPEDFATYYCQQGYYLWTFGQGTKVEIKR

SEQ ID NO: 79 - protein, 255 aa, Artificial Sequence
  Synthetic Construct
QAVVTQEPSLTVSPGGTVTLTCGSSTGAVTTSNYANWVQQKPGQAPRGLIGGTNKRAPGVPARFSGSLLGGKAALTLSGAQPEDEAEYYCALWYSNLWVFGGGTKLTVLRGGGGSGGGGSGGGGSGGGGSEVQLVESGGGLVQPGGSLRLSCAASGFTFNTYAMNWVRQAPGKGLEWVGRIRSKYNNYATYYADSVKGRFTISRDDSKNTLYLQMNSLRAEDTAVYYCVRHGNFGNSYVSWFAYWGQGTLVTVSS

SEQ ID NO: 80 - protein, 5 aa, Artificial Sequence
  Synthetic Construct
SGGGS

SEQ ID NO: 81 - protein, 9 aa, Artificial Sequence
  Synthetic Construct
GGGSGGGGS

SEQ ID NO: 82 - protein, 20 aa, Artificial Sequence
  Synthetic Construct
GGGGSGGGGSGGGGSGGGGS

SEQ ID NO: 83 - protein, 245 aa, Artificial Sequence
  Synthetic Construct
EVQLVESGGGLVQPGGSLRLSCAASGYSISSGYHWSWIRQAPGKGLEWLARIDWDDDKYYSTSLKSRLTISRDNSKNTLYLQLNSLRAEDTAVYYCARSYVYFDYWGQGTLVTVSSGGGGSGGGGSGGGGSGGGGSDIQLTQSPSSLSASVGDRVTITCRASQSVRGRFLAWYQQKPGKAPKLLIYDASNRATGIPSRFSGSGSGTDFTLTISSLQPEDFATYYCQQSSSWPPTFGQGTKVEIKR

SEQ ID NO: 84 - protein, 216 aa, Artificial Sequence
  TY22121_LC1|aa
DIQLTQSPSSLSASVGDRVTITCRASQSIPSFLNWYQQKPGKAPKLLIYAASSLQSGVPSRFSGSGSGTDFTLTISSLQPEDFATYYCQHYISWPRQFTFGQGTKVEIKRTVAAPSVFIFPPSDEQLKSGTASVVCLLNNFYPREAKVQWKVDNALQSGNSQESVTEQDSKDSTYSLSSTLTLSKADYEKHKVYACEVTHQGLSSPVTKSFNRGEC

SEQ ID NO: 85 - protein, 702 aa, Artificial Sequence
  TY22121_HC1|aa
EVQLVESGGGLVQPGGSLRLSCAASGYSISSGYYWGWIRQAPGKGLEWIGIIYPSGGGTNYAQKFQGRVTISRDNSKNTLYLQLNSLRAEDTAVYYCARGGGLGFDYWGQGTLVTVSSASTKGPSVFPLAPSSKSTSGGTAALGCLVKDYFPEPVTVSWNSGALTSGVHTFPAVLQSSGLYSLSSVVTVPSSSLGTQTYICNVNHKPSNTKVDKRVEPKSCDKTHTCPPCPAPELLGGPSVFLFPPKPKDTLMISRTPEVTCVVVDVSHEDPEVKFNWYVDGVEVHNAKTKPREEQYNSTYRVVSVLTVLHQDWLNGKEYKCKVSNKALPAPIEKTISKAKGQPREPQVYTLPPSREEMTKNQVSLTCLVKGFYPSDIAVEWESNGQPENNYKTTPPVLDSDGSFFLYSKLTVDKSRWQQGNVFSCSVMHEALHNHYTQKSLSLSPGSGGGSEVQLVESGGGLVQPGGSLRLSCAASGFSLSTGGVGVGWIRQAPGKCLEWLALIDWADDKYYSPSLKSRLTISRDNSKNTLYLQLNSLRAEDTAVYYCARGGSDTVIGDWFAYWGQGTLVTVSSGGGGSGGGGSGGGGSGGGGSDIQLTQSPSSLSASVGDRVTITCRASQSIGSYLAWYQQKPGKAPKLLIYDASNLETGVPSRFSGSGSGTDFTLTISSLQPEDFATYYCQQGYYLWTFGCGTKVEIKR

SEQ ID NO: 86 - protein, 216 aa, Artificial Sequence; identical to SEQ ID NO: 84
  TY22148_LC1|aa

SEQ ID NO: 87 - protein, 702 aa, Artificial Sequence
  TY22148_HC1|aa
EVQLVESGGGLVQPGGSLRLSCAASGYSISSGYYWGWIRQAPGKGLEWIGIIYPSGGGTNYAQKFQGRVTISRDNSKNTLYLQLNSLRAEDTAVYYCARGGGLGFDYWGQGTLVTVSSASTKGPSVFPLAPSSKSTSGGTAALGCLVKDYFPEPVTVSWNSGALTSGVHTFPAVLQSSGLYSLSSVVTVPSSSLGTQTYICNVNHKPSNTKVDKRVEPKSCDKTHTCPPCPAPELLGGPSVFLFPPKPKDTLMISRTPEVTCVVVDVSHEDPEVKFNWYVDGVEVHNAKTKPREEQYNSTYRVVSVLTVLHQDWLNGKEYKCKVSNKALPAPIEKTISKAKGQPREPQVYTLPPSREEMTKNQVSLTCLVKGFYPSDIAVEWESNGQPENCYKTTPPVLDCDGSFFLYSKLTVDKSRWQQGNVFSCSVMHEALHNHYTQKSLSLSPGSGGGSEVQLVESGGGLVQPGGSLRLSCAASGFSLSTGGVGVGWIRQAPGKCLEWLALIDWADDKYYSPSLKSRLTISRDNSKNTLYLQLNSLRAEDTAVYYCARGGSDTVIGDWFAYWGQGTLVTVSSGGGGSGGGGSGGGGSGGGGSDIQLTQSPSSLSASVGDRVTITCRASQSIGSYLAWYQQKPGKAPKLLIYDASNLETGVPSRFSGSGSGTDFTLTISSLQPEDFATYYCQQGYYLWTFGCGTKVEIKR

SEQ ID NO: 88 - protein, 216 aa, Artificial Sequence; identical to SEQ ID NO: 84
  TY22172_LC1|aa

SEQ ID NO: 89 - protein, 702 aa, Artificial Sequence
  TY22172_HC1|aa
EVQLVESGGGLVQPGGSLRLSCAASGYSISSGYYWGWIRQAPGKGLEWIGIIYPSGGGTNYAQKFQGRVTISRDNSKNTLYLQLNSLRAEDTAVYYCARGGGLGFDYWGQGTLVTVSSASTKGPSVFPLAPSSKSTSGGTAALGCLVKDYFPEPVTVSWNSGALTSGVHTFPAVLQSSGLYSLSSVVTVPSSSLGTQTYICNVNHKPSNTKVDKRVEPKSCDKTHTCPPCPAPELLGGPSVFLFPPKPKDTLMISRTPEVTCVVVDVSHEDPEVKFNWYVDGVEVHNAKTKPREEQYASTYRVVSVLTVLHQDWLNGKEYKCKVSNKALPAPIEKTISKAKGQPREPQVYTLPPSREEMTKNQVSLTCLVKGFYPSDIAVEWESNGQPENNYKTTPPVLDSDGSFFLYSKLTVDKSRWQQGNVFSCSVMHEALHNHYTQKSLSLSPGSGGGSEVQLVESGGGLVQPGGSLRLSCAASGFSLSTGGVGVGWIRQAPGKCLEWLALIDWADDKYYSPSLKSRLTISRDNSKNTLYLQLNSLRAEDTAVYYCARGGSDTVIGDWFAYWGQGTLVTVSSGGGGSGGGGSGGGGSGGGGSDIQLTQSPSSLSASVGDRVTITCRASQSIGSYLAWYQQKPGKAPKLLIYDASNLETGVPSRFSGSGSGTDFTLTISSLQPEDFATYYCQQGYYLWTFGCGTKVEIKR

SEQ ID NO: 90 - protein, 216 aa, Artificial Sequence; identical to SEQ ID NO: 84
  TY22176_LC1|aa

SEQ ID NO: 91 - protein, 702 aa, Artificial Sequence
  TY22176_HC1|aa
EVQLVESGGGLVQPGGSLRLSCAASGYSISSGYYWGWIRQAPGKGLEWIGIIYPSGGGTNYAQKFQGRVTISRDNSKNTLYLQLNSLRAEDTAVYYCARGGGLGFDYWGQGTLVTVSSASTKGPSVFPLAPSSKSTSGGTAALGCLVKDYFPEPVTVSWNSGALTSGVHTFPAVLQSSGLYSLSSVVTVPSSSLGTQTYICNVNHKPSNTKVDKRVEPKSCDKTHTCPPCPAPELLGGPSVFLFPPKPKDTLMISRTPEVTCVVVDVSHEDPEVKFNWYVDGVEVHNAKTKPREEQYASTYRVVSVLTVLHQDWLNGKEYKCKVSNKALPAPIEKTISKAKGQPREPQVYTLPPSREEMTKNQVSLTCLVKGFYPSDIAVEWESNGQPENCYKTTPPVLDCDGSFFLYSKLTVDKSRWQQGNVFSCSVMHEALHNHYTQKSLSLSPGSGGGSEVQLVESGGGLVQPGGSLRLSCAASGFSLSTGGVGVGWIRQAPGKCLEWLALIDWADDKYYSPSLKSRLTISRDNSKNTLYLQLNSLRAEDTAVYYCARGGSDTVIGDWFAYWGQGTLVTVSSGGGGSGGGGSGGGGSGGGGSDIQLTQSPSSLSASVGDRVTITCRASQSIGSYLAWYQQKPGKAPKLLIYDASNLETGVPSRFSGSGSGTDFTLTISSLQPEDFATYYCQQGYYLWTFGCGTKVEIKR

SEQ ID NO: 92 - protein, 216 aa, Artificial Sequence; identical to SEQ ID NO: 84
  TY22161_LC1|aa

SEQ ID NO: 93 - protein, 699 aa, Artificial Sequence
  TY22161_HC1|aa
EVQLVESGGGLVQPGGSLRLSCAASGYSISSGYYWGWIRQAPGKGLEWIGIIYPSGGGTNYAQKFQGRVTISRDNSKNTLYLQLNSLRAEDTAVYYCARGGGLGFDYWGQGTLVTVSSASTKGPSVFPLAPCSRSTSESTAALGCLVKDYFPEPVTVSWNSGALTSGVHTFPAVLQSSGLYSLSSVVTVPSSSLGTKTYTCNVDHKPSNTKVDKRVESKYGPPCPPCPAPEFLGGPSVFLFPPKPKDTLMISRTPEVTCVVVDVSQEDPEVQFNWYVDGVEVHNAKTKPREEQFNSTYRVVSVLTVLHQDWLNGKEYKCKVSNKGLPSSIEKTISKAKGQPREPQVYTLPPSQEEMTKNQVSLTCLVKGFYPSDIAVEWESNGQPENNYKTTPPVLDSDGSFFLYSRLTVDKSRWQEGNVFSCSVMHEALHNHYTQKSLSLSLGSGGGSEVQLVESGGGLVQPGGSLRLSCAASGFSLSTGGVGVGWIRQAPGKCLEWLALIDWADDKYYSPSLKSRLTISRDNSKNTLYLQLNSLRAEDTAVYYCARGGSDTVIGDWFAYWGQGTLVTVSSGGGGSGGGGSGGGGSGGGGSDIQLTQSPSSLSASVGDRVTITCRASQSIGSYLAWYQQKPGKAPKLLIYDASNLETGVPSRFSGSGSGTDFTLTISSLQPEDFATYYCQQGYYLWTFGCGTKVEIKR

SEQ ID NO: 94 - protein, 216 aa, Artificial Sequence; identical to SEQ ID NO: 84
  TY22165_LC1|aa

SEQ ID NO: 95 - protein, 699 aa, Artificial Sequence
  TY22165_HC1|aa
EVQLVESGGGLVQPGGSLRLSCAASGYSISSGYYWGWIRQAPGKGLEWIGIIYPSGGGTNYAQKFQGRVTISRDNSKNTLYLQLNSLRAEDTAVYYCARGGGLGFDYWGQGTLVTVSSASTKGPSVFPLAPCSRSTSESTAALGCLVKDYFPEPVTVSWNSGALTSGVHTFPAVLQSSGLYSLSSVVTVPSSSLGTKTYTCNVDHKPSNTKVDKRVESKYGPPCPPCPAPEFLGGPSVFLFPPKPKDTLMISRTPEVTCVVVDVSQEDPEVQFNWYVDGVEVHNAKTKPREEQFNSTYRVVSVLTVLHQDWLNGKEYKCKVSNKGLPSSIEKTISKAKGQPREPQVYTLPPSQEEMTKNQVSLTCLVKGFYPSDIAVEWESNGQPENCYKTTPPVLDCDGSFFLYSRLTVDKSRWQEGNVFSCSVMHEALHNHYTQKSLSLSLGSGGGSEVQLVESGGGLVQPGGSLRLSCAASGFSLSTGGVGVGWIRQAPGKCLEWLALIDWADDKYYSPSLKSRLTISRDNSKNTLYLQLNSLRAEDTAVYYCARGGSDTVIGDWFAYWGQGTLVTVSSGGGGSGGGGSGGGGSGGGGSDIQLTQSPSSLSASVGDRVTITCRASQSIGSYLAWYQQKPGKAPKLLIYDASNLETGVPSRFSGSGSGTDFTLTISSLQPEDFATYYCQQGYYLWTFGCGTKVEIKR

SEQ ID NO: 96 - protein, 213 aa, Artificial Sequence
  TY22122_LC1|aa
DIQLTQSPSSLSASVGDRVTITCRASQSIGSYLAWYQQKPGKAPKLLIYDASNLETGVPSRFSGSGSGTDFTLTISSLQPEDFATYYCQQGYYLWTFGQGTKVEIKRTVAAPSVFIFPPSDEQLKSGTASVVCLLNNFYPREAKVQWKVDNALQSGNSQESVTEQDSKDSTYSLSSTLTLSKADYEKHKVYACEVTHQGLSSPVTKSFNRGEC

SEQ ID NO: 97 - protein, 705 aa, Artificial Sequence
  TY22122_HC1|aa
EVQLVESGGGLVQPGGSLRLSCAASGFSLSTGGVGVGWIRQAPGKGLEWLALIDWADDKYYSPSLKSRLTISRDNSKNTLYLQLNSLRAEDTAVYYCARGGSDTVIGDWFAYWGQGTLVTVSSASTKGPSVFPLAPSSKSTSGGTAALGCLVKDYFPEPVTVSWNSGALTSGVHTFPAVLQSSGLYSLSSVVTVPSSSLGTQTYICNVNHKPSNTKVDKRVEPKSCDKTHTCPPCPAPELLGGPSVFLFPPKPKDTLMISRTPEVTCVVVDVSHEDPEVKFNWYVDGVEVHNAKTKPREEQYNSTYRVVSVLTVLHQDWLNGKEYKCKVSNKALPAPIEKTISKAKGQPREPQVYTLPPSREEMTKNQVSLTCLVKGFYPSDIAVEWESNGQPENNYKTTPPVLDSDGSFFLYSKLTVDKSRWQQGNVFSCSVMHEALHNHYTQKSLSLSPGSGGGSEVQLVESGGGLVQPGGSLRLSCAASGYSISSGYYWGWIRQAPGKCLEWIGIIYPSGGGTNYAQKFQGRVTISRDNSKNTLYLQLNSLRAEDTAVYYCARGGGLGFDYWGQGTLVTVSSGGGGSGGGGSGGGGSGGGGSDIQLTQSPSSLSASVGDRVTITCRASQSIPSFLNWYQQKPGKAPKLLIYAASSLQSGVPSRFSGSGSGTDFTLTISSLQPEDFATYYCQHYISWPRQFTFGCGTKVEIKR

SEQ ID NO: 98 - protein, 213 aa, Artificial Sequence; identical to SEQ ID NO: 96
  TY22149_LC1|aa

SEQ ID NO: 99 - protein, 705 aa, Artificial Sequence
  TY22149_HC1|aa
EVQLVESGGGLVQPGGSLRLSCAASGFSLSTGGVGVGWIRQAPGKGLEWLALIDWADDKYYSPSLKSRLTISRDNSKNTLYLQLNSLRAEDTAVYYCARGGSDTVIGDWFAYWGQGTLVTVSSASTKGPSVFPLAPSSKSTSGGTAALGCLVKDYFPEPVTVSWNSGALTSGVHTFPAVLQSSGLYSLSSVVTVPSSSLGTQTYICNVNHKPSNTKVDKRVEPKSCDKTHTCPPCPAPELLGGPSVFLFPPKPKDTLMISRTPEVTCVVVDVSHEDPEVKFNWYVDGVEVHNAKTKPREEQYNSTYRVVSVLTVLHQDWLNGKEYKCKVSNKALPAPIEKTISKAKGQPREPQVYTLPPSREEMTKNQVSLTCLVKGFYPSDIAVEWESNGQPENCYKTTPPVLDCDGSFFLYSKLTVDKSRWQQGNVFSCSVMHEALHNHYTQKSLSLSPGSGGGSEVQLVESGGGLVQPGGSLRLSCAASGYSISSGYYWGWIRQAPGKCLEWIGIIYPSGGGTNYAQKFQGRVTISRDNSKNTLYLQLNSLRAEDTAVYYCARGGGLGFDYWGQGTLVTVSSGGGGSGGGGSGGGGSGGGGSDIQLTQSPSSLSASVGDRVTITCRASQSIPSFLNWYQQKPGKAPKLLIYAASSLQSGVPSRFSGSGSGTDFTLTISSLQPEDFATYYCQHYISWPRQFTFGCGTKVEIKR

SEQ ID NO: 100 - protein, 213 aa, Artificial Sequence; identical to SEQ ID NO: 96
  TY22173_LC1|aa

SEQ ID NO: 101 - protein, 705 aa, Artificial Sequence
  TY22173_HC1|aa
EVQLVESGGGLVQPGGSLRLSCAASGFSLSTGGVGVGWIRQAPGKGLEWLALIDWADDKYYSPSLKSRLTISRDNSKNTLYLQLNSLRAEDTAVYYCARGGSDTVIGDWFAYWGQGTLVTVSSASTKGPSVFPLAPSSKSTSGGTAALGCLVKDYFPEPVTVSWNSGALTSGVHTFPAVLQSSGLYSLSSVVTVPSSSLGTQTYICNVNHKPSNTKVDKRVEPKSCDKTHTCPPCPAPELLGGPSVFLFPPKPKDTLMISRTPEVTCVVVDVSHEDPEVKFNWYVDGVEVHNAKTKPREEQYASTYRVVSVLTVLHQDWLNGKEYKCKVSNKALPAPIEKTISKAKGQPREPQVYTLPPSREEMTKNQVSLTCLVKGFYPSDIAVEWESNGQPENNYKTTPPVLDSDGSFFLYSKLTVDKSRWQQGNVFSCSVMHEALHNHYTQKSLSLSPGSGGGSEVQLVESGGGLVQPGGSLRLSCAASGYSISSGYYWGWIRQAPGKCLEWIGIIYPSGGGTNYAQKFQGRVTISRDNSKNTLYLQLNSLRAEDTAVYYCARGGGLGFDYWGQGTLVTVSSGGGGSGGGGSGGGGSGGGGSDIQLTQSPSSLSASVGDRVTITCRASQSIPSFLNWYQQKPGKAPKLLIYAASSLQSGVPSRFSGSGSGTDFTLTISSLQPEDFATYYCQHYISWPRQFTFGCGTKVEIKR

SEQ ID NO: 102 - protein, 213 aa, Artificial Sequence; identical to SEQ ID NO: 96
  TY22177_L1|aa

SEQ ID NO: 103 - protein, 705 aa, Artificial Sequence
  TY22177_H1|aa
EVQLVESGGGLVQPGGSLRLSCAASGFSLSTGGVGVGWIRQAPGKGLEWLALIDWADDKYYSPSLKSRLTISRDNSKNTLYLQLNSLRAEDTAVYYCARGGSDTVIGDWFAYWGQGTLVTVSSASTKGPSVFPLAPSSKSTSGGTAALGCLVKDYFPEPVTVSWNSGALTSGVHTFPAVLQSSGLYSLSSVVTVPSSSLGTQTYICNVNHKPSNTKVDKRVEPKSCDKTHTCPPCPAPELLGGPSVFLFPPKPKDTLMISRTPEVTCVVVDVSHEDPEVKFNWYVDGVEVHNAKTKPREEQYASTYRVVSVLTVLHQDWLNGKEYKCKVSNKALPAPIEKTISKAKGQPREPQVYTLPPSREEMTKNQVSLTCLVKGFYPSDIAVEWESNGQPENCYKTTPPVLDCDGSFFLYSKLTVDKSRWQQGNVFSCSVMHEALHNHYTQKSLSLSPGSGGGSEVQLVESGGGLVQPGGSLRLSCAASGYSISSGYYWGWIRQAPGKCLEWIGIIYPSGGGTNYAQKFQGRVTISRDNSKNTLYLQLNSLRAEDTAVYYCARGGGLGFDYWGQGTLVTVSSGGGGSGGGGSGGGGSGGGGSDIQLTQSPSSLSASVGDRVTITCRASQSIPSFLNWYQQKPGKAPKLLIYAASSLQSGVPSRFSGSGSGTDFTLTISSLQPEDFATYYCQHYISWPRQFTFGCGTKVEIKR

SEQ ID NO: 104 - protein, 213 aa, Artificial Sequence; identical to SEQ ID NO: 96
  TY22359_LC1|aa

SEQ ID NO: 105 - protein, 710 aa, Artificial Sequence
  TY22359_HC1|aa
EVQLVESGGGLVQPGGSLRLSCAASGFSLSTGGVGVGWIRQAPGKGLEWLALIDWADDKYYSPSLKSRLTISRDNSKNTLYLQLNSLRAEDTAVYYCARGGSDTVIGDWFAYWGQGTLVTVSSASTKGPSVFPLAPSSKSTSGGTAALGCLVKDYFPEPVTVSWNSGALTSGVHTFPAVLQSSGLYSLSSVVTVPSSSLGTQTYICNVNHKPSNTKVDKRVEPKSCDKTHTCPPCPAPELLGGPSVFLFPPKPKDTLMISRTPEVTCVVVDVSHEDPEVKFNWYVDGVEVHNAKTKPREEQYASTYRVVSVLTVLHQDWLNGKEYKCKVSNKALPAPIEKTISKAKGQPREPQVYTLPPSREEMTKNQVSLTCLVKGFYPSDIAVEWESNGQPENCYKTTPPVLDCDGSFFLYSKLTVDKSRWQQGNVFSCSVMHEALHNHYTQKSLSLSPGSGGGSGGGGSEVQLVESGGGLVQPGGSLRLSCAASGYSISSGYYWGWIRQAPGKCLEWIGIIYPSGGGTNYAQKFQGRVTISRDNSKNTLYLQLNSLRAEDTAVYYCARGGGLGFDYWGQGTLVTVSSGGGGSGGGGSGGGGSGGGGSDIQLTQSPSSLSASVGDRVTITCRASQSIPSFLNWYQQKPGKAPKLLIYAASSLQSGVPSRFSGSGSGTDFTLTISSLQPEDFATYYCQHYISWPRQFTFGCGTKVEIKR

SEQ ID NO: 106 - protein, 213 aa, Artificial Sequence; identical to SEQ ID NO: 96
  TY22162_LC1 |aa

SEQ ID NO: 107 - protein, 702 aa, Artificial Sequence
  TY22162_HC1|aa
EVQLVESGGGLVQPGGSLRLSCAASGFSLSTGGVGVGWIRQAPGKGLEWLALIDWADDKYYSPSLKSRLTISRDNSKNTLYLQLNSLRAEDTAVYYCARGGSDTVIGDWFAYWGQGTLVTVSSASTKGPSVFPLAPCSRSTSESTAALGCLVKDYFPEPVTVSWNSGALTSGVHTFPAVLQSSGLYSLSSVVTVPSSSLGTKTYTCNVDHKPSNTKVDKRVESKYGPPCPPCPAPEFLGGPSVFLFPPKPKDTLMISRTPEVTCVVVDVSQEDPEVQFNWYVDGVEVHNAKTKPREEQFNSTYRVVSVLTVLHQDWLNGKEYKCKVSNKGLPSSIEKTISKAKGQPREPQVYTLPPSQEEMTKNQVSLTCLVKGFYPSDIAVEWESNGQPENNYKTTPPVLDSDGSFFLYSRLTVDKSRWQEGNVFSCSVMHEALHNHYTQKSLSLSLGSGGGSEVQLVESGGGLVQPGGSLRLSCAASGYSISSGYYWGWIRQAPGKCLEWIGIIYPSGGGTNYAQKFQGRVTISRDNSKNTLYLQLNSLRAEDTAVYYCARGGGLGFDYWGQGTLVTVSSGGGGSGGGGSGGGGSGGGGSDIQLTQSPSSLSASVGDRVTITCRASQSIPSFLNWYQQKPGKAPKLLIYAASSLQSGVPSRFSGSGSGTDFTLTISSLQPEDFATYYCQHYISWPRQFTFGCGTKVEIKR

SEQ ID NO: 108 - protein, 213 aa, Artificial Sequence; identical to SEQ ID NO: 96
  TY22166_L1|aa

SEQ ID NO: 109 - protein, 702 aa, Artificial Sequence
  TY22166_H1|aa
EVQLVESGGGLVQPGGSLRLSCAASGFSLSTGGVGVGWIRQAPGKGLEWLALIDWADDKYYSPSLKSRLTISRDNSKNTLYLQLNSLRAEDTAVYYCARGGSDTVIGDWFAYWGQGTLVTVSSASTKGPSVFPLAPCSRSTSESTAALGCLVKDYFPEPVTVSWNSGALTSGVHTFPAVLQSSGLYSLSSVVTVPSSSLGTKTYTCNVDHKPSNTKVDKRVESKYGPPCPPCPAPEFLGGPSVFLFPPKPKDTLMISRTPEVTCVVVDVSQEDPEVQFNWYVDGVEVHNAKTKPREEQFNSTYRVVSVLTVLHQDWLNGKEYKCKVSNKGLPSSIEKTISKAKGQPREPQVYTLPPSQEEMTKNQVSLTCLVKGFYPSDIAVEWESNGQPENCYKTTPPVLDCDGSFFLYSRLTVDKSRWQEGNVFSCSVMHEALHNHYTQKSLSLSLGSGGGSEVQLVESGGGLVQPGGSLRLSCAASGYSISSGYYWGWIRQAPGKCLEWIGIIYPSGGGTNYAQKFQGRVTISRDNSKNTLYLQLNSLRAEDTAVYYCARGGGLGFDYWGQGTLVTVSSGGGGSGGGGSGGGGSGGGGSDIQLTQSPSSLSASVGDRVTITCRASQSIPSFLNWYQQKPGKAPKLLIYAASSLQSGVPSRFSGSGSGTDFTLTISSLQPEDFATYYCQHYISWPRQFTFGCGTKVEIKR

SEQ ID NO: 110 - protein, 213 aa, Artificial Sequence; identical to SEQ ID NO: 96
  TY22362_LC1|aa

SEQ ID NO: 111 - protein, 707 aa, Artificial Sequence
  TY22362_HC1|aa
EVQLVESGGGLVQPGGSLRLSCAASGFSLSTGGVGVGWIRQAPGKGLEWLALIDWADDKYYSPSLKSRLTISRDNSKNTLYLQLNSLRAEDTAVYYCARGGSDTVIGDWFAYWGQGTLVTVSSASTKGPSVFPLAPCSRSTSESTAALGCLVKDYFPEPVTVSWNSGALTSGVHTFPAVLQSSGLYSLSSVVTVPSSSLGTKTYTCNVDHKPSNTKVDKRVESKYGPPCPPCPAPEFLGGPSVFLFPPKPKDTLMISRTPEVTCVVVDVSQEDPEVQFNWYVDGVEVHNAKTKPREEQFNSTYRVVSVLTVLHQDWLNGKEYKCKVSNKGLPSSIEKTISKAKGQPREPQVYTLPPSQEEMTKNQVSLTCLVKGFYPSDIAVEWESNGQPENCYKTTPPVLDCDGSFFLYSRLTVDKSRWQEGNVFSCSVMHEALHNHYTQKSLSLSLGSGGGSGGGGSEVQLVESGGGLVQPGGSLRLSCAASGYSISSGYYWGWIRQAPGKCLEWIGIIYPSGGGTNYAQKFQGRVTISRDNSKNTLYLQLNSLRAEDTAVYYCARGGGLGFDYWGQGTLVTVSSGGGGSGGGGSGGGGSGGGGSDIQLTQSPSSLSASVGDRVTITCRASQSIPSFLNWYQQKPGKAPKLLIYAASSLQSGVPSRFSGSGSGTDFTLTISSLQPEDFATYYCQHYISWPRQFTFGCGTKVEIKR

SEQ ID NO: 112 - protein, 214 aa, Artificial Sequence
  TY24051_LC1|aa
DIQMTQSPSSLSASVGDRVTITCRASQDVNTAVAWYQQKPGKAPKLLIYSASFLYSGVPSRFSGSRSGTDFTLTISSLQPEDFATYYCQQHYTTPPTFGQGTKVEIKRTVAAPSVFIFPPSDEQLKSGTASVVCLLNNFYPREAKVQWKVDNALQSGNSQESVTEQDSKDSTYSLSSTLTLSKADYEKHKVYACEVTHQGLSSPVTKSFNRGEC

SEQ ID NO: 113 - protein, 450 aa, Artificial Sequence
  TY24051_HC1|aa
EVQLVESGGGLVQPGGSLRLSCAASGFNIKDTYIHWVRQAPGKGLEWVARIYPTNGYTRYADSVKGRFTISADTSKNTAYLQMNSLRAEDTAVYYCSRWGGDGFYAMDYWGQGTLVTVSSASTKGPSVFPLAPSSKSTSGGTAALGCLVKDYFPEPVTVSWNSGALTSGVHTFPAVLQSSGLYSLSSVVTVPSSSLGTQTYICNVNHKPSNTKVDKKVEPKSCDKTHTCPPCPAPELLGGPSVFLFPPKPKDTLMISRTPEVTCVVVDVSHEDPEVKFNWYVDGVEVHNAKTKPREEQYASTYRVVSVLTVLHQDWLNGKEYKCKVSNKALPAPIEKTISKAKGQPREPQVYTLPPSRKKLTKNQVKLTCLVKGFYPSDIAVEWESNGQPENNYKTTPPVLDCDGSFFLYSKLTVDKSRWQQGNVFSCSVMHEALHNHYTQKSLSLSPGK

SEQ ID NO: 114 - protein, 487 aa, Artificial Sequence
  TY24051_HC2|aa
QAVVTQEPSLTVSPGGTVTLTCGSSTGAVTTSNYANWVQQKPGQAPRGLIGGTNKRAPGVPARFSGSLLGGKAALTLSGAQPEDEAEYYCALWYSNLWVFGGGTKLTVLRGGGGSGGGGSGGGGSGGGGSEVQLVESGGGLVQPGGSLRLSCAASGFTFNTYAMNWVRQAPGKGLEWVGRIRSKYNNYATYYADSVKGRFTISRDDSKNTLYLQMNSLRAEDTAVYYCVRHGNFGNSYVSWFAYWGQGTLVTVSSEPKSSDKTHTCPPCPAPELLGGPSVFLFPPKPKDTLMISRTPEVTCVVVDVSHEDPEVKFNWYVDGVEVHNAKTKPREEQYASTYRVVSVLTVLHQDWLNGKEYKCKVSNKALPAPIEKTISKAKGQPREPQVYTDPPSRDELTKNQVSLTCLVDGFYPSDIAVEWESNGQPENCYKTTPPVLDSDGSFFLYSKLTVDKSRWQQGNVFSCSVMHEALHNHYTQDSLSLSPGK

SEQ ID NO: 115 - protein, 238 aa, Artificial Sequence
  TY24052_LC1|aa
ESDACDADPFDCQAPLGLAGSGGSDIQMTQSPSSLSASVGDRVTITCRASQDVNTAVAWYQQKPGKAPKLLIYSASFLYSGVPSRFSGSRSGTDFTLTISSLQPEDFATYYCQQHYTTPPTFGQGTKVEIKRTVAAPSVFIFPPSDEQLKSGTASVVCLLNNFYPREAKVQWKVDNALQSGNSQESVTEQDSKDSTYSLSSTLTLSKADYEKHKVYACEVTHQGLSSPVTKSFNRGEC

SEQ ID NO: 116 - protein, 450 aa, Artificial Sequence; identical to SEQ ID NO: 113
  TY24052_HC1|aa

SEQ ID NO: 117 - protein, 528 aa, Artificial Sequence
  TY24052_HC2|aa
EVGSYPYDDPDCPSHDSDCDNSGRSAGGGGTPLGLAGSGGSQAVVTQEPSLTVSPGGTVTLTCGSSTGAVTTSNYANWVQQKPGQAPRGLIGGTNKRAPGVPARFSGSLLGGKAALTLSGAQPEDEAEYYCALWYSNLWVFGGGTKLTVLRGGGGSGGGGSGGGGSGGGGSEVQLVESGGGLVQPGGSLRLSCAASGFTFNTYAMNWVRQAPGKGLEWVGRIRSKYNNYATYYADSVKGRFTISRDDSKNTLYLQMNSLRAEDTAVYYCVRHGNFGNSYVSWFAYWGQGTLVTVSSEPKSSDKTHTCPPCPAPELLGGPSVFLFPPKPKDTLMISRTPEVTCVVVDVSHEDPEVKFNWYVDGVEVHNAKTKPREEQYASTYRVVSVLTVLHQDWLNGKEYKCKVSNKALPAPIEKTISKAKGQPREPQVYTDPPSRDELTKNQVSLTCLVDGFYPSDIAVEWESNGQPENCYKTTPPVLDSDGSFFLYSKLTVDKSRWQQGNVFSCSVMHEALHNHYTQDSLSLSPGK

SEQ ID NO: 118 - protein, 213 aa, Artificial Sequence; identical to SEQ ID NO: 96
  TY22224_LC1|aa

SEQ ID NO: 119 - protein, 705 aa, Artificial Sequence
  TY22224_HC1|aa
EVQLVESGGGLVQPGGSLRLSCAASGFSLSTGGVGVGWIRQAPGKGLEWLALIDWADDKYYSPSLKSRLTISRDNSKNTLYLQLNSLRAEDTAVYYCARGGSDTVIGDWFAYWGQGTLVTVSSASTKGPSVFPLAPSSKSTSGGTAALGCLVKDYFPEPVTVSWNSGALTSGVHTFPAVLQSSGLYSLSSVVTVPSSSLGTQTYICNVNHKPSNTKVDKRVEPKSCDKTHTCPPCPAPELLGGPSVFLFPPKPKDTLMISRTPEVTCVVVDVSHEDPEVKFNWYVDGVEVHNAKTKPREEQYNSTYRVVSVLTVLHQDWLNGKEYKCKVSNKALPAPIEKTISKAKGQPREPQVYTLPPSREKMTKNQVKLTCLVKGFYPSDIAVEWESNGQPENNYKTTPPVLDCDGSFFLYSKLTVDKSRWQQGNVFSCSVMHEALHNHYTQKSLSLSPGSGGGSEVQLVESGGGLVQPGGSLRLSCAASGYSISSGYYWGWIRQAPGKCLEWIGIIYPSGGGTNYAQKFQGRVTISRDNSKNTLYLQLNSLRAEDTAVYYCARGGGLGFDYWGQGTLVTVSSGGGGSGGGGSGGGGSGGGGSDIQLTQSPSSLSASVGDRVTITCRASQSIPSFLNWYQQKPGKAPKLLIYAASSLQSGVPSRFSGSGSGTDFTLTISSLQPEDFATYYCQHYISWPRQFTFGCGTKVEIKR

SEQ ID NO: 120 - protein, 702 aa, Artificial Sequence
  TY22224_HC2|aa
EVQLVESGGGLVQPGGSLRLSCAASGFSLSTGGVGVGWIRQAPGKGLEWLALIDWADDKYYSPSLKSRLTISRDNSKNTLYLQLNSLRAEDTAVYYCARGGSDTVIGDWFAYWGQGTLVTVSSASTKGPSVFPLAPSSKSTSGGTAALGCLVKDYFPEPVTVSWNSGALTSGVHTFPAVLQSSGLYSLSSVVTVPSSSLGTQTYICNVNHKPSNTKVDKRVEPKSCDKTHTCPPCPAPELLGGPSVFLFPPKPKDTLMISRTPEVTCVVVDVSHEDPEVKFNWYVDGVEVHNAKTKPREEQYNSTYRVVSVLTVLHQDWLNGKEYKCKVSNKALPAPIEKTISKAKGQPREPQVYTDPPSREEMTKNQVSLTCLVDGFYPSDIAVEWESNGQPENCYKTTPPVLDSDGSFFLYSKLTVDKSRWQQGNVFSCSVMHEALHNHYTQKSLSLSPGSGGGSEVQLVESGGGLVQPGGSLRLSCAASGYSISSGYHWSWIRQAPGKCLEWLARIDWDDDKYYSTSLKSRLTISRDNSKNTLYLQLNSLRAEDTAVYYCARSYVYFDYWGQGTLVTVSSGGGGSGGGGSGGGGSGGGGSDIQLTQSPSSLSASVGDRVTITCRASQSVRGRFLAWYQQKPGKAPKLLIYDASNRATGIPSRFSGSGSGTDFTLTISSLQPEDFATYYCQQSSSWPPTFGCGTKVEIKR

SEQ ID NO: 121 - protein, 213 aa, Artificial Sequence; identical to SEQ ID NO: 96
  TY22225_LC1|aa

SEQ ID NO: 122 - protein, 705 aa, Artificial Sequence
  TY22225_HC1|aa
EVQLVESGGGLVQPGGSLRLSCAASGFSLSTGGVGVGWIRQAPGKGLEWLALIDWADDKYYSPSLKSRLTISRDNSKNTLYLQLNSLRAEDTAVYYCARGGSDTVIGDWFAYWGQGTLVTVSSASTKGPSVFPLAPSSKSTSGGTAALGCLVKDYFPEPVTVSWNSGALTSGVHTFPAVLQSSGLYSLSSVVTVPSSSLGTQTYICNVNHKPSNTKVDKRVEPKSCDKTHTCPPCPAPELLGGPSVFLFPPKPKDTLMISRTPEVTCVVVDVSHEDPEVKFNWYVDGVEVHNAKTKPREEQYNSTYRVVSVLTVLHQDWLNGKEYKCKVSNKALPAPIEKTISKAKGQPREPQVYTLPPSREKMTKNQVKLTCLVKGFYPSDIAVEWESNGQPENCYKTTPPVLDCDGSFFLYSKLTVDKSRWQQGNVFSCSVMHEALHNHYTQKSLSLSPGSGGGSEVQLVESGGGLVQPGGSLRLSCAASGYSISSGYYWGWIRQAPGKCLEWIGIIYPSGGGTNYAQKFQGRVTISRDNSKNTLYLQLNSLRAEDTAVYYCARGGGLGFDYWGQGTLVTVSSGGGGSGGGGSGGGGSGGGGSDIQLTQSPSSLSASVGDRVTITCRASQSIPSFLNWYQQKPGKAPKLLIYAASSLQSGVPSRFSGSGSGTDFTLTISSLQPEDFATYYCQHYISWPRQFTFGCGTKVEIKR

SEQ ID NO: 123 - protein, 702 aa, Artificial Sequence
  TY22225_HC2|aa
EVQLVESGGGLVQPGGSLRLSCAASGFSLSTGGVGVGWIRQAPGKGLEWLALIDWADDKYYSPSLKSRLTISRDNSKNTLYLQLNSLRAEDTAVYYCARGGSDTVIGDWFAYWGQGTLVTVSSASTKGPSVFPLAPSSKSTSGGTAALGCLVKDYFPEPVTVSWNSGALTSGVHTFPAVLQSSGLYSLSSVVTVPSSSLGTQTYICNVNHKPSNTKVDKRVEPKSCDKTHTCPPCPAPELLGGPSVFLFPPKPKDTLMISRTPEVTCVVVDVSHEDPEVKFNWYVDGVEVHNAKTKPREEQYNSTYRVVSVLTVLHQDWLNGKEYKCKVSNKALPAPIEKTISKAKGQPREPQVYTDPPSREEMTKNQVSLTCLVDGFYPSDIAVEWESNGQPENCYKTTPPVLDCDGSFFLYSKLTVDKSRWQQGNVFSCSVMHEALHNHYTQKSLSLSPGSGGGSEVQLVESGGGLVQPGGSLRLSCAASGYSISSGYHWSWIRQAPGKCLEWLARIDWDDDKYYSTSLKSRLTISRDNSKNTLYLQLNSLRAEDTAVYYCARSYVYFDYWGQGTLVTVSSGGGGSGGGGSGGGGSGGGGSDIQLTQSPSSLSASVGDRVTITCRASQSVRGRFLAWYQQKPGKAPKLLIYDASNRATGIPSRFSGSGSGTDFTLTISSLQPEDFATYYCQQSSSWPPTFGCGTKVEIKR

SEQ ID NO: 124 - protein, 213 aa, Artificial Sequence; identical to SEQ ID NO: 96
  TY22226_LC1|aa

SEQ ID NO: 125 - protein, 705 aa, Artificial Sequence
  TY22226_HC1|aa
EVQLVESGGGLVQPGGSLRLSCAASGFSLSTGGVGVGWIRQAPGKGLEWLALIDWADDKYYSPSLKSRLTISRDNSKNTLYLQLNSLRAEDTAVYYCARGGSDTVIGDWFAYWGQGTLVTVSSASTKGPSVFPLAPSSKSTSGGTAALGCLVKDYFPEPVTVSWNSGALTSGVHTFPAVLQSSGLYSLSSVVTVPSSSLGTQTYICNVNHKPSNTKVDKRVEPKSCDKTHTCPPCPAPELLGGPSVFLFPPKPKDTLMISRTPEVTCVVVDVSHEDPEVKFNWYVDGVEVHNAKTKPREEQYASTYRVVSVLTVLHQDWLNGKEYKCKVSNKALPAPIEKTISKAKGQPREPQVYTLPPSREKMTKNQVKLTCLVKGFYPSDIAVEWESNGQPENCYKTTPPVLDCDGSFFLYSKLTVDKSRWQQGNVFSCSVMHEALHNHYTQKSLSLSPGSGGGSEVQLVESGGGLVQPGGSLRLSCAASGYSISSGYYWGWIRQAPGKCLEWIGIIYPSGGGTNYAQKFQGRVTISRDNSKNTLYLQLNSLRAEDTAVYYCARGGGLGFDYWGQGTLVTVSSGGGGSGGGGSGGGGSGGGGSDIQLTQSPSSLSASVGDRVTITCRASQSIPSFLNWYQQKPGKAPKLLIYAASSLQSGVPSRFSGSGSGTDFTLTISSLQPEDFATYYCQHYISWPRQFTFGCGTKVEIKR

SEQ ID NO: 126 - protein, 702 aa, Artificial Sequence
  TY22226_HC2|aa
EVQLVESGGGLVQPGGSLRLSCAASGFSLSTGGVGVGWIRQAPGKGLEWLALIDWADDKYYSPSLKSRLTISRDNSKNTLYLQLNSLRAEDTAVYYCARGGSDTVIGDWFAYWGQGTLVTVSSASTKGPSVFPLAPSSKSTSGGTAALGCLVKDYFPEPVTVSWNSGALTSGVHTFPAVLQSSGLYSLSSVVTVPSSSLGTQTYICNVNHKPSNTKVDKRVEPKSCDKTHTCPPCPAPELLGGPSVFLFPPKPKDTLMISRTPEVTCVVVDVSHEDPEVKFNWYVDGVEVHNAKTKPREEQYASTYRVVSVLTVLHQDWLNGKEYKCKVSNKALPAPIEKTISKAKGQPREPQVYTDPPSREEMTKNQVSLTCLVDGFYPSDIAVEWESNGQPENCYKTTPPVLDCDGSFFLYSKLTVDKSRWQQGNVFSCSVMHEALHNHYTQKSLSLSPGSGGGSEVQLVESGGGLVQPGGSLRLSCAASGYSISSGYHWSWIRQAPGKCLEWLARIDWDDDKYYSTSLKSRLTISRDNSKNTLYLQLNSLRAEDTAVYYCARSYVYFDYWGQGTLVTVSSGGGGSGGGGSGGGGSGGGGSDIQLTQSPSSLSASVGDRVTITCRASQSVRGRFLAWYQQKPGKAPKLLIYDASNRATGIPSRFSGSGSGTDFTLTISSLQPEDFATYYCQQSSSWPPTFGCGTKVEIKR

SEQ ID NO: 127 - protein, 5 aa, Artificial Sequence
  Synthetic Construct
SGRSA

SEQ ID NO: 128 - protein, 6 aa, Artificial Sequence
  Synthetic Construct
PLGLAG

SEQ ID NO: 129 - protein, 7 aa, Artificial Sequence
  Synthetic Construct
ENLYFQG

SEQ ID NO: 130 - protein, 5 aa, Artificial Sequence
  Synthetic Construct
GGGGS

SEQ ID NO: 131 - protein, 4 aa, Artificial Sequence
  Synthetic Construct
SGGS

SEQ ID NO: 132 - protein, 4 aa, Artificial Sequence
  Synthetic Construct
GGSG

SEQ ID NO: 133 - protein, 5 aa, Artificial Sequence
  Synthetic Construct
GGSGG

SEQ ID NO: 134 - protein, 5 aa, Artificial Sequence
  Synthetic Construct
GSGSG

SEQ ID NO: 135 - protein, 5 aa, Artificial Sequence
  Synthetic Construct
GSGGG

SEQ ID NO: 136 - protein, 5 aa, Artificial Sequence
  Synthetic Construct
GGGSG

SEQ ID NO: 137 - protein, 5 aa, Artificial Sequence
  Synthetic Construct
GSSSG

SEQ ID NO: 138 - protein, 107 aa, Artificial Sequence; identical to SEQ ID NO: 24
  IgG1_FC1_CH3_S390C

SEQ ID NO: 139 - protein, 107 aa, Artificial Sequence; identical to SEQ ID NO: 23
  IgG1_FC2_CH3_S400'C

SEQ ID NO: 140 - protein, 107 aa, Artificial Sequence; identical to SEQ ID NO: 23
  IgG1_FC1_CH3_S400C

SEQ ID NO: 141 - protein, 107 aa, Artificial Sequence; identical to SEQ ID NO: 24
  IgG1_FC2_CH3_N390'C

SEQ ID NO: 142 - protein, 107 aa, Artificial Sequence; identical to SEQ ID NO: 25
  IgG1_FC1_CH3_K392C

SEQ ID NO: 143 - protein, 107 aa, Artificial Sequence; identical to SEQ ID NO: 26
  IgG1_FC2_CH3_V397'C

SEQ ID NO: 144 - protein, 107 aa, Artificial Sequence; identical to SEQ ID NO: 26
  IgG1_FC1_CH3_V397C

SEQ ID NO: 145 - protein, 107 aa, Artificial Sequence; identical to SEQ ID NO: 25
  IgG1_FC2_CH3_K392'C

SEQ ID NO: 146 - protein, 107 aa, Artificial Sequence; identical to SEQ ID NO: 25
  IgG1_FC1_CH3_K392C

SEQ ID NO: 147 - protein, 107 aa, Artificial Sequence; identical to SEQ ID NO: 23
  IgG1_FC2_CH3_S400'C

SEQ ID NO: 148 - protein, 107 aa, Artificial Sequence; identical to SEQ ID NO: 23
  IgG1_FC1_CH3_S400C

SEQ ID NO: 149 - protein, 107 aa, Artificial Sequence; identical to SEQ ID NO: 25
  IgG1_FC2_CH3_K392'C

SEQ ID NO: 150 - protein, 107 aa, Artificial Sequence; identical to SEQ ID NO: 9
  IgG1_FC1_CH3_E357K:T411K

SEQ ID NO: 151 - protein, 107 aa, Artificial Sequence; identical to SEQ ID NO: 10
  IgG1_FC2_CH3_L351'D:K370'D

SEQ ID NO: 152 - protein, 107 aa, Artificial Sequence; identical to SEQ ID NO: 11
  IgG1_FC1_CH3_E357K:S364K

SEQ ID NO: 153 - protein, 107 aa, Artificial Sequence; identical to SEQ ID NO: 10
  IgG1_FC2_CH3_L351'D:K370'D

SEQ ID NO: 154 - protein, 107 aa, Artificial Sequence; identical to SEQ ID NO: 13
  IgG1_FC1_CH3_D356K:E357K:S364K

SEQ ID NO: 155 - protein, 107 aa, Artificial Sequence; identical to SEQ ID NO: 14
  IgG1_FC2_CH3_L351'D:K370'D:K439'D

SEQ ID NO: 156 - protein, 107 aa, Artificial Sequence; identical to SEQ ID NO: 15
  IgG1_FC1_CH3_E357K:S364K:N390C

SEQ ID NO: 157 - protein, 107 aa, Artificial Sequence; identical to SEQ ID NO: 16
  IgG1_FC2_CH3_L351'D:K370'D:S400'C

SEQ ID NO: 158 - protein, 107 aa, Artificial Sequence; identical to SEQ ID NO: 17
  IgG1_FC1_CH3_E357K:S364K:S400C

SEQ ID NO: 159 - protein, 107 aa, Artificial Sequence; identical to SEQ ID NO: 18
  IgG1_FC2_CH3_L351'D:K370'D:N390'C

SEQ ID NO: 160 - protein, 107 aa, Artificial Sequence; identical to SEQ ID NO: 19
  IgG1_FC1_CH3_D356K:E357K:S364K:N390C

SEQ ID NO: 161 - protein, 107 aa, Artificial Sequence; identical to SEQ ID NO: 20
  IgG1_FC2_CH3_L351'D:K370'D:S400'C:K439'D

SEQ ID NO: 162 - protein, 107 aa, Artificial Sequence; identical to SEQ ID NO: 21
  IgG1_FC1_CH3_D356K:E357K:S364K:S400C

SEQ ID NO: 163 - protein, 107 aa, Artificial Sequence; identical to SEQ ID NO: 22
  IgG1_FC2_CH3_L351'D:K370'D:N390'C:K439'D

SEQ ID NO: 164 - protein, 107 aa, Artificial Sequence; identical to SEQ ID NO: 1
  IgG1_FC1_CH3_T366S,L368A,Y407V,N390C

SEQ ID NO: 165 - protein, 107 aa, Artificial Sequence; identical to SEQ ID NO: 2
  IgG1_FC2_CH3_T366'W,S400'C

SEQ ID NO: 166 - protein, 107 aa, Artificial Sequence; identical to SEQ ID NO: 3
  IgG1_FC1_CH3_T366S,L368A,Y407V,S400C

SEQ ID NO: 167 - protein, 107 aa, Artificial Sequence; identical to SEQ ID NO: 4
  IgG1_FC2_CH3_T366'W,N390'C

SEQ ID NO: 168 - protein, 107 aa, Artificial Sequence
  IgG1_FC1_CH3_Y349C,L368V,Y407V
GQPREPQVCTLPPSRDELTKNQVSLTCVVKGFYPSDIAVEWESNGQPENNYKTTPPVLDSDGSFFLVSKLTVDKSRWQQGNVFSCSVMHEALHNHYTQKSLSLSPGK

SEQ ID NO: 169 - protein, 107 aa, Artificial Sequence
  IgG1_FC2_CH3_S354'C,T366'W
GQPREPQVYTLPPCRDELTKNQVSLWCLVKGFYPSDIAVEWESNGQPENNYKTTPPVLDSDGSFFLYSKLTVDKSRWQQGNVFSCSVMHEALHNHYTQKSLSLSPGK

SEQ ID NO: 170 - protein, 107 aa, Artificial Sequence
  IgG1_FC1_CH3_L368V,Y407V
GQPREPQVYTLPPSRDELTKNQVSLTCVVKGFYPSDIAVEWESNGQPENNYKTTPPVLDSDGSFFLVSKLTVDKSRWQQGNVFSCSVMHEALHNHYTQKSLSLSPGK

SEQ ID NO: 171 - protein, 107 aa, Artificial Sequence
  IgG1_FC2_CH3_T366'W
GQPREPQVYTLPPSRDELTKNQVSLWCLVKGFYPSDIAVEWESNGQPENNYKTTPPVLDSDGSFFLYSKLTVDKSRWQQGNVFSCSVMHEALHNHYTQKSLSLSPGK

SEQ ID NO: 172 - protein, 107 aa, Artificial Sequence; identical to SEQ ID NO: 5
  IgG1_FC1_CH3_L368V,Y407V,N390C

SEQ ID NO: 173 - protein, 107 aa, Artificial Sequence; identical to SEQ ID NO: 2
  IgG1_FC2_CH3_T366'W,S400'C

SEQ ID NO: 174 - protein, 107 aa, Artificial Sequence; identical to SEQ ID NO: 7
  IgG1_FC1_CH3_L368V,Y407V,S400C

SEQ ID NO: 175 - protein, 107 aa, Artificial Sequence; identical to SEQ ID NO: 4
  IgG1_FC2_CH3_T366'W,N390'C

SEQ ID NO: 176 - protein, 107 aa, Artificial Sequence
  IgG1_FC1_CH3_S390C
GQPREPQVYTLPPSREEMTKNQVSLTCLVKGFYPSDIAVEWESNGQPENCYKTTPPVLDSDGSFFLYSKLTVDKSRWQQGNVFSCSVMHEALHNHYTQKSLSLSPGK

SEQ ID NO: 177 - protein, 107 aa, Artificial Sequence
  IgG1_FC2_CH3_S400'C
GQPREPQVYTLPPSREEMTKNQVSLTCLVKGFYPSDIAVEWESNGQPENNYKTTPPVLDCDGSFFLYSKLTVDKSRWQQGNVFSCSVMHEALHNHYTQKSLSLSPGK

SEQ ID NO: 178 - protein, 107 aa, Artificial Sequence; identical to SEQ ID NO: 177
  IgG1_FC1_CH3_

SEQ ID NO: 179 - protein, 107 aa, Artificial Sequence; identical to SEQ ID NO: 176
  IgG1_FC2_CH3_

SEQ ID NO: 180 - protein, 107 aa, Artificial Sequence
  IgG1_FC1_CH3_K392C
GQPREPQVYTLPPSREEMTKNQVSLTCLVKGFYPSDIAVEWESNGQPENNYCTTPPVLDSDGSFFLYSKLTVDKSRWQQGNVFSCSVMHEALHNHYTQKSLSLSPGK

SEQ ID NO: 181 - protein, 107 aa, Artificial Sequence
  IgG1_FC2_CH3_V397'C
GQPREPQVYTLPPSREEMTKNQVSLTCLVKGFYPSDIAVEWESNGQPENNYKTTPPCLDSDGSFFLYSKLTVDKSRWQQGNVFSCSVMHEALHNHYTQKSLSLSPGK

SEQ ID NO: 182 - protein, 107 aa, Artificial Sequence; identical to SEQ ID NO: 181
  IgG1_FC1_CH3_V397C

SEQ ID NO: 183 - protein, 107 aa, Artificial Sequence; identical to SEQ ID NO: 180
  IgG1_FC2_CH3_K392'C

SEQ ID NO: 184 - protein, 107 aa, Artificial Sequence; identical to SEQ ID NO: 180
  IgG1_FC1_CH3_K392C

SEQ ID NO: 185 - protein, 107 aa, Artificial Sequence; identical to SEQ ID NO: 177
  IgG1_FC2_CH3_S400'C

SEQ ID NO: 186 - protein, 107 aa, Artificial Sequence; identical to SEQ ID NO: 177
  IgG1_FC1_CH3_S400C

SEQ ID NO: 187 - protein, 107 aa, Artificial Sequence; identical to SEQ ID NO: 180
  IgG1_FC2_CH3_K392'C

SEQ ID NO: 188 - protein, 107 aa, Artificial Sequence
  IgG1_FC1_CH3_E357K:T411K
GQPREPQVYTLPPSREKMTKNQVSLTCLVKGFYPSDIAVEWESNGQPENNYKTTPPVLDSDGSFFLYSKLKVDKSRWQQGNVFSCSVMHEALHNHYTQKSLSLSPGK

SEQ ID NO: 189 - protein, 107 aa, Artificial Sequence
  IgG1_FC2_CH3_L351'D:K370'D
GQPREPQVYTDPPSREEMTKNQVSLTCLVDGFYPSDIAVEWESNGQPENNYKTTPPVLDSDGSFFLYSKLTVDKSRWQQGNVFSCSVMHEALHNHYTQKSLSLSPGK

SEQ ID NO: 190 - protein, 107 aa, Artificial Sequence
  IgG1_FC1_CH3_E357K:S364K
GQPREPQVYTLPPSREKMTKNQVKLTCLVKGFYPSDIAVEWESNGQPENNYKTTPPVLDSDGSFFLYSKLTVDKSRWQQGNVFSCSVMHEALHNHYTQKSLSLSPGK

SEQ ID NO: 191 - protein, 107 aa, Artificial Sequence; identical to SEQ ID NO: 189
  IgG1_FC2_CH3_L351'D:K370'D

SEQ ID NO: 192 - protein, 107 aa, Artificial Sequence
  IgG1_FC1_CH3_E356K:E357K:S364K
GQPREPQVYTLPPSRKKMTKNQVKLTCLVKGFYPSDIAVEWESNGQPENNYKTTPPVLDSDGSFFLYSKLTVDKSRWQQGNVFSCSVMHEALHNHYTQKSLSLSPGK

SEQ ID NO: 193 - protein, 107 aa, Artificial Sequence
  IgG1_FC2_CH3_L351'D:K370'D:K439'D
GQPREPQVYTDPPSREEMTKNQVSLTCLVDGFYPSDIAVEWESNGQPENNYKTTPPVLDSDGSFFLYSKLTVDKSRWQQGNVFSCSVMHEALHNHYTQDSLSLSPGK

SEQ ID NO: 194 - protein, 107 aa, Artificial Sequence
  IgG1_FC1_CH3_E357K:S364K:N390C
GQPREPQVYTLPPSREKMTKNQVKLTCLVKGFYPSDIAVEWESNGQPENCYKTTPPVLDSDGSFFLYSKLTVDKSRWQQGNVFSCSVMHEALHNHYTQKSLSLSPGK

SEQ ID NO: 195 - protein, 107 aa, Artificial Sequence
  IgG1_FC2_CH3_L351'D:K370'D:S400'C
GQPREPQVYTDPPSREEMTKNQVSLTCLVDGFYPSDIAVEWESNGQPENNYKTTPPVLDCDGSFFLYSKLTVDKSRWQQGNVFSCSVMHEALHNHYTQKSLSLSPGK

SEQ ID NO: 196 - protein, 107 aa, Artificial Sequence
  IgG1_FC1_CH3_E357K:S364K:S400C
GQPREPQVYTLPPSREKMTKNQVKLTCLVKGFYPSDIAVEWESNGQPENNYKTTPPVLDCDGSFFLYSKLTVDKSRWQQGNVFSCSVMHEALHNHYTQKSLSLSPGK

SEQ ID NO: 197 - protein, 107 aa, Artificial Sequence
  IgG1_FC2_CH3_L351'D:K370'D:N390'C
GQPREPQVYTDPPSREEMTKNQVSLTCLVDGFYPSDIAVEWESNGQPENCYKTTPPVLDSDGSFFLYSKLTVDKSRWQQGNVFSCSVMHEALHNHYTQKSLSLSPGK

SEQ ID NO: 198 - protein, 107 aa, Artificial Sequence
  IgG1_FC1_CH3_E356K:E357K:S364K:N390C
GQPREPQVYTLPPSRKKMTKNQVKLTCLVKGFYPSDIAVEWESNGQPENCYKTTPPVLDSDGSFFLYSKLTVDKSRWQQGNVFSCSVMHEALHNHYTQKSLSLSPGK

SEQ ID NO: 199 - protein, 107 aa, Artificial Sequence
  IgG1_FC2_CH3_L351'D:K370'D:S400'C:K439'D
GQPREPQVYTDPPSREEMTKNQVSLTCLVDGFYPSDIAVEWESNGQPENNYKTTPPVLDCDGSFFLYSKLTVDKSRWQQGNVFSCSVMHEALHNHYTQDSLSLSPGK

SEQ ID NO: 200 - protein, 107 aa, Artificial Sequence
  IgG1_FC1_CH3_E356K:E357K:S364K:S400C
GQPREPQVYTLPPSRKKMTKNQVKLTCLVKGFYPSDIAVEWESNGQPENNYKTTPPVLDCDGSFFLYSKLTVDKSRWQQGNVFSCSVMHEALHNHYTQKSLSLSPGK

SEQ ID NO: 201 - protein, 107 aa, Artificial Sequence
  IgG1_FC2_CH3_L351'D:K370'D:N390'C:K439'D
GQPREPQVYTDPPSREEMTKNQVSLTCLVDGFYPSDIAVEWESNGQPENCYKTTPPVLDSDGSFFLYSKLTVDKSRWQQGNVFSCSVMHEALHNHYTQDSLSLSPGK

SEQ ID NO: 202 - protein, 107 aa, Artificial Sequence
  IgG1_FC1_CH3_T366S,L368A,Y407V,N390C
GQPREPQVYTLPPSREEMTKNQVSLSCAVKGFYPSDIAVEWESNGQPENCYKTTPPVLDSDGSFFLVSKLTVDKSRWQQGNVFSCSVMHEALHNHYTQKSLSLSPGK

SEQ ID NO: 203 - protein, 107 aa, Artificial Sequence
  IgG1_FC2_CH3_T366'W,S400'C
GQPREPQVYTLPPSREEMTKNQVSLWCLVKGFYPSDIAVEWESNGQPENNYKTTPPVLDCDGSFFLYSKLTVDKSRWQQGNVFSCSVMHEALHNHYTQKSLSLSPGK

SEQ ID NO: 204 - protein, 107 aa, Artificial Sequence
  IgG1_FC1_CH3_T366S,L368A,Y407V,S400C
GQPREPQVYTLPPSREEMTKNQVSLSCAVKGFYPSDIAVEWESNGQPENNYKTTPPVLDCDGSFFLVSKLTVDKSRWQQGNVFSCSVMHEALHNHYTQKSLSLSPGK

SEQ ID NO: 205 - protein, 107 aa, Artificial Sequence
  IgG1_FC2_CH3_T366'W,N390'C
GQPREPQVYTLPPSREEMTKNQVSLWCLVKGFYPSDIAVEWESNGQPENCYKTTPPVLDSDGSFFLYSKLTVDKSRWQQGNVFSCSVMHEALHNHYTQKSLSLSPGK

SEQ ID NO: 206 - protein, 107 aa, Artificial Sequence
  IgG1_FC1_CH3_Y349C,L368V,Y407V
GQPREPQVCTLPPSREEMTKNQVSLTCVVKGFYPSDIAVEWESNGQPENNYKTTPPVLDSDGSFFLVSKLTVDKSRWQQGNVFSCSVMHEALHNHYTQKSLSLSPGK

SEQ ID NO: 207 - protein, 107 aa, Artificial Sequence
  IgG1_FC2_CH3_S354'C,T366'W
GQPREPQVYTLPPCREEMTKNQVSLWCLVKGFYPSDIAVEWESNGQPENNYKTTPPVLDSDGSFFLYSKLTVDKSRWQQGNVFSCSVMHEALHNHYTQKSLSLSPGK

SEQ ID NO: 208 - protein, 107 aa, Artificial Sequence
  IgG1_FC1_CH3_L368V,Y407V
GQPREPQVYTLPPSREEMTKNQVSLTCVVKGFYPSDIAVEWESNGQPENNYKTTPPVLDSDGSFFLVSKLTVDKSRWQQGNVFSCSVMHEALHNHYTQKSLSLSPGK

SEQ ID NO: 209 - protein, 107 aa, Artificial Sequence
  IgG1_FC2_CH3_T366'W
GQPREPQVYTLPPSREEMTKNQVSLWCLVKGFYPSDIAVEWESNGQPENNYKTTPPVLDSDGSFFLYSKLTVDKSRWQQGNVFSCSVMHEALHNHYTQKSLSLSPGK

SEQ ID NO: 210 - protein, 107 aa, Artificial Sequence
  IgG1_FC1_CH3_L368V,Y407V,N390C
GQPREPQVYTLPPSREEMTKNQVSLTCVVKGFYPSDIAVEWESNGQPENCYKTTPPVLDSDGSFFLVSKLTVDKSRWQQGNVFSCSVMHEALHNHYTQKSLSLSPGK

SEQ ID NO: 211 - protein, 107 aa, Artificial Sequence; identical to SEQ ID NO: 203
  IgG1_FC2_CH3_T366'W,S400'C

SEQ ID NO: 212 - protein, 107 aa, Artificial Sequence
  IgG1_FC1_CH3_L368V,Y407V,S400C
GQPREPQVYTLPPSREEMTKNQVSLTCVVKGFYPSDIAVEWESNGQPENNYKTTPPVLDCDGSFFLVSKLTVDKSRWQQGNVFSCSVMHEALHNHYTQKSLSLSPGK

SEQ ID NO: 213 - protein, 107 aa, Artificial Sequence; identical to SEQ ID NO: 205
  IgG1_FC2_CH3_T366'W,N390'C

SEQ ID NO: 214 - protein, 107 aa, Artificial Sequence
  IgG4_FC1_CH3_S390C
GQPREPQVYTLPPSQEEMTKNQVSLTCLVKGFYPSDIAVEWESNGQPENCYKTTPPVLDSDGSFFLYSRLTVDKSRWQEGNVFSCSVMHEALHNHYTQKSLSLSLGK

SEQ ID NO: 215 - protein, 107 aa, Artificial Sequence
  IgG4_FC2_CH3_S400'C
GQPREPQVYTLPPSQEEMTKNQVSLTCLVKGFYPSDIAVEWESNGQPENNYKTTPPVLDCDGSFFLYSRLTVDKSRWQEGNVFSCSVMHEALHNHYTQKSLSLSLGK

SEQ ID NO: 216 - protein, 107 aa, Artificial Sequence; identical to SEQ ID NO: 215
  IgG4_FC1_CH3_

SEQ ID NO: 217 - protein, 107 aa, Artificial Sequence; identical to SEQ ID NO: 214
  IgG4_FC2_CH3_

SEQ ID NO: 218 - protein, 107 aa, Artificial Sequence
  IgG4_FC1_CH3_K392C
GQPREPQVYTLPPSQEEMTKNQVSLTCLVKGFYPSDIAVEWESNGQPENNYCTTPPVLDSDGSFFLYSRLTVDKSRWQEGNVFSCSVMHEALHNHYTQKSLSLSLGK

SEQ ID NO: 219 - protein, 107 aa, Artificial Sequence
  IgG4_FC2_CH3_V397'C
GQPREPQVYTLPPSQEEMTKNQVSLTCLVKGFYPSDIAVEWESNGQPENNYKTTPPCLDSDGSFFLYSRLTVDKSRWQEGNVFSCSVMHEALHNHYTQKSLSLSLGK

SEQ ID NO: 220 - protein, 107 aa, Artificial Sequence; identical to SEQ ID NO: 219
  IgG4_FC1_CH3_V397C

SEQ ID NO: 221 - protein, 107 aa, Artificial Sequence; identical to SEQ ID NO: 218
  IgG4_FC2_CH3_K392'C

SEQ ID NO: 222 - protein, 107 aa, Artificial Sequence; identical to SEQ ID NO: 218
  IgG4_FC1_CH3_K392C

SEQ ID NO: 223 - protein, 107 aa, Artificial Sequence; identical to SEQ ID NO: 215
  IgG4_FC2_CH3_S400'C

SEQ ID NO: 224 - protein, 107 aa, Artificial Sequence; identical to SEQ ID NO: 215
  IgG4_FC1_CH3_S400C

SEQ ID NO: 225 - protein, 107 aa, Artificial Sequence; identical to SEQ ID NO: 218
  IgG4_FC2_CH3_K392'C

SEQ ID NO: 226 - protein, 107 aa, Artificial Sequence
  IgG4_FC1_CH3_E357K:T411K
GQPREPQVYTLPPSQEKMTKNQVSLTCLVKGFYPSDIAVEWESNGQPENNYKTTPPVLDSDGSFFLYSRLKVDKSRWQEGNVFSCSVMHEALHNHYTQKSLSLSLGK

SEQ ID NO: 227 - protein, 107 aa, Artificial Sequence
  IgG4_FC2_CH3_L351'D:K370'D
GQPREPQVYTDPPSQEEMTKNQVSLTCLVDGFYPSDIAVEWESNGQPENNYKTTPPVLDSDGSFFLYSRLTVDKSRWQEGNVFSCSVMHEALHNHYTQKSLSLSLGK

SEQ ID NO: 228 - protein, 107 aa, Artificial Sequence
  IgG4_FC1_CH3_E357K:S364K
GQPREPQVYTLPPSQEKMTKNQVKLTCLVKGFYPSDIAVEWESNGQPENNYKTTPPVLDSDGSFFLYSRLTVDKSRWQEGNVFSCSVMHEALHNHYTQKSLSLSLGK

SEQ ID NO: 229 - protein, 107 aa, Artificial Sequence; identical to SEQ ID NO: 227
  IgG4_FC2_CH3_L351'D:K370'D

SEQ ID NO: 230 - protein, 107 aa, Artificial Sequence
  IgG4_FC1_CH3_E356K:E357K:S364K
GQPREPQVYTLPPSQKKMTKNQVKLTCLVKGFYPSDIAVEWESNGQPENNYKTTPPVLDSDGSFFLYSRLTVDKSRWQEGNVFSCSVMHEALHNHYTQKSLSLSLGK

SEQ ID NO: 231 - protein, 107 aa, Artificial Sequence
  IgG4_FC2_CH3_L351'D:K370'D:K439'D
GQPREPQVYTDPPSQEEMTKNQVSLTCLVDGFYPSDIAVEWESNGQPENNYKTTPPVLDSDGSFFLYSRLTVDKSRWQEGNVFSCSVMHEALHNHYTQDSLSLSLGK

SEQ ID NO: 232 - protein, 107 aa, Artificial Sequence
  IgG4_FC1_CH3_E357K:S364K:N390C
GQPREPQVYTLPPSQEKMTKNQVKLTCLVKGFYPSDIAVEWESNGQPENCYKTTPPVLDSDGSFFLYSRLTVDKSRWQEGNVFSCSVMHEALHNHYTQKSLSLSLGK

SEQ ID NO: 233 - protein, 107 aa, Artificial Sequence
  IgG4_FC2_CH3_L351'D:K370'D:S400'C
GQPREPQVYTDPPSQEEMTKNQVSLTCLVDGFYPSDIAVEWESNGQPENNYKTTPPVLDCDGSFFLYSRLTVDKSRWQEGNVFSCSVMHEALHNHYTQKSLSLSLGK

SEQ ID NO: 234 - protein, 107 aa, Artificial Sequence
  IgG4_FC1_CH3_E357K:S364K:S400C
GQPREPQVYTLPPSQEKMTKNQVKLTCLVKGFYPSDIAVEWESNGQPENNYKTTPPVLDCDGSFFLYSRLTVDKSRWQEGNVFSCSVMHEALHNHYTQKSLSLSLGK

SEQ ID NO: 235 - protein, 107 aa, Artificial Sequence
  IgG4_FC2_CH3_L351'D:K370'D:N390'C
GQPREPQVYTDPPSQEEMTKNQVSLTCLVDGFYPSDIAVEWESNGQPENCYKTTPPVLDSDGSFFLYSRLTVDKSRWQEGNVFSCSVMHEALHNHYTQKSLSLSLGK

SEQ ID NO: 236 - protein, 107 aa, Artificial Sequence
  IgG4_FC1_CH3_E356K:E357K:S364K:N390C
GQPREPQVYTLPPSQKKMTKNQVKLTCLVKGFYPSDIAVEWESNGQPENCYKTTPPVLDSDGSFFLYSRLTVDKSRWQEGNVFSCSVMHEALHNHYTQKSLSLSLGK

SEQ ID NO: 237 - protein, 107 aa, Artificial Sequence
  IgG4_FC2_CH3_L351'D:K370'D:S400'C:K439'D
GQPREPQVYTDPPSQEEMTKNQVSLTCLVDGFYPSDIAVEWESNGQPENNYKTTPPVLDCDGSFFLYSRLTVDKSRWQEGNVFSCSVMHEALHNHYTQDSLSLSLGK

SEQ ID NO: 238 - protein, 107 aa, Artificial Sequence
  IgG4_FC1_CH3_E356K:E357K:S364K:S400C
GQPREPQVYTLPPSQKKMTKNQVKLTCLVKGFYPSDIAVEWESNGQPENNYKTTPPVLDCDGSFFLYSRLTVDKSRWQEGNVFSCSVMHEALHNHYTQKSLSLSLGK

SEQ ID NO: 239 - protein, 107 aa, Artificial Sequence
  IgG4_FC2_CH3_L351'D:K370'D:N390'C:K439'D
GQPREPQVYTDPPSQEEMTKNQVSLTCLVDGFYPSDIAVEWESNGQPENCYKTTPPVLDSDGSFFLYSRLTVDKSRWQEGNVFSCSVMHEALHNHYTQDSLSLSLGK

SEQ ID NO: 240 - protein, 107 aa, Artificial Sequence
  IgG4_FC1_CH3_T366S,L368A,Y407V,N390C
GQPREPQVYTLPPSQEEMTKNQVSLSCAVKGFYPSDIAVEWESNGQPENCYKTTPPVLDSDGSFFLVSRLTVDKSRWQEGNVFSCSVMHEALHNHYTQKSLSLSLGK

SEQ ID NO: 241 - protein, 107 aa, Artificial Sequence
  IgG4_FC2_CH3_T366'W,S400'C
GQPREPQVYTLPPSQEEMTKNQVSLWCLVKGFYPSDIAVEWESNGQPENNYKTTPPVLDCDGSFFLYSRLTVDKSRWQEGNVFSCSVMHEALHNHYTQKSLSLSLGK

SEQ ID NO: 242 - protein, 107 aa, Artificial Sequence
  IgG4_FC1_CH3_T366S,L368A,Y407V,S400C
GQPREPQVYTLPPSQEEMTKNQVSLSCAVKGFYPSDIAVEWESNGQPENNYKTTPPVLDCDGSFFLVSRLTVDKSRWQEGNVFSCSVMHEALHNHYTQKSLSLSLGK

SEQ ID NO: 243 - protein, 107 aa, Artificial Sequence
  IgG4_FC2_CH3_T366'W,N390'C
GQPREPQVYTLPPSQEEMTKNQVSLWCLVKGFYPSDIAVEWESNGQPENCYKTTPPVLDSDGSFFLYSRLTVDKSRWQEGNVFSCSVMHEALHNHYTQKSLSLSLGK

SEQ ID NO: 244 - protein, 107 aa, Artificial Sequence
  IgG4_FC1_CH3_Y349C,L368V,Y407V
GQPREPQVCTLPPSQEEMTKNQVSLTCVVKGFYPSDIAVEWESNGQPENNYKTTPPVLDSDGSFFLVSRLTVDKSRWQEGNVFSCSVMHEALHNHYTQKSLSLSLGK

SEQ ID NO: 245 - protein, 107 aa, Artificial Sequence
  IgG4_FC2_CH3_S354'C,T366'W
GQPREPQVYTLPPCQEEMTKNQVSLWCLVKGFYPSDIAVEWESNGQPENNYKTTPPVLDSDGSFFLYSRLTVDKSRWQEGNVFSCSVMHEALHNHYTQKSLSLSLGK

SEQ ID NO: 246 - protein, 107 aa, Artificial Sequence
  IgG4_FC1_CH3_L368V,Y407V
GQPREPQVYTLPPSQEEMTKNQVSLTCVVKGFYPSDIAVEWESNGQPENNYKTTPPVLDSDGSFFLVSRLTVDKSRWQEGNVFSCSVMHEALHNHYTQKSLSLSLGK

SEQ ID NO: 247 - protein, 107 aa, Artificial Sequence
  IgG4_FC2_CH3_T366'W
GQPREPQVYTLPPSQEEMTKNQVSLWCLVKGFYPSDIAVEWESNGQPENNYKTTPPVLDSDGSFFLYSRLTVDKSRWQEGNVFSCSVMHEALHNHYTQKSLSLSLGK

SEQ ID NO: 248 - protein, 107 aa, Artificial Sequence
  IgG4_FC1_CH3_L368V,Y407V,N390C
GQPREPQVYTLPPSQEEMTKNQVSLTCVVKGFYPSDIAVEWESNGQPENCYKTTPPVLDSDGSFFLVSRLTVDKSRWQEGNVFSCSVMHEALHNHYTQKSLSLSLGK

SEQ ID NO: 249 - protein, 107 aa, Artificial Sequence; identical to SEQ ID NO: 241
  IgG4_FC2_CH3_T366'W,S400'C

SEQ ID NO: 250 - protein, 107 aa, Artificial Sequence
  IgG4_FC1_CH3_L368V,Y407V,S400C
GQPREPQVYTLPPSQEEMTKNQVSLTCVVKGFYPSDIAVEWESNGQPENNYKTTPPVLDCDGSFFLVSRLTVDKSRWQEGNVFSCSVMHEALHNHYTQKSLSLSLGK

SEQ ID NO: 251 - protein, 107 aa, Artificial Sequence; identical to SEQ ID NO: 243
  IgG4_FC2_CH3_T366'W,N390'C

SEQ ID NO: 252 - protein, 330 aa, Artificial Sequence
  IgG1_FC1_S390C
ASTKGPSVFPLAPSSKSTSGGTAALGCLVKDYFPEPVTVSWNSGALTSGVHTFPAVLQSSGLYSLSSVVTVPSSSLGTQTYICNVNHKPSNTKVDKKVEPKSCDKTHTCPPCPAPELLGGPSVFLFPPKPKDTLMISRTPEVTCVVVDVSHEDPEVKFNWYVDGVEVHNAKTKPREEQYNSTYRVVSVLTVLHQDWLNGKEYKCKVSNKALPAPIEKTISKAKGQPREPQVYTLPPSRDELTKNQVSLTCLVKGFYPSDIAVEWESNGQPENCYKTTPPVLDSDGSFFLYSKLTVDKSRWQQGNVFSCSVMHEALHNHYTQKSLSLSPGK

SEQ ID NO: 253 - protein, 330 aa, Artificial Sequence
  IgG1_FC2_S400'C
ASTKGPSVFPLAPSSKSTSGGTAALGCLVKDYFPEPVTVSWNSGALTSGVHTFPAVLQSSGLYSLSSVVTVPSSSLGTQTYICNVNHKPSNTKVDKKVEPKSCDKTHTCPPCPAPELLGGPSVFLFPPKPKDTLMISRTPEVTCVVVDVSHEDPEVKFNWYVDGVEVHNAKTKPREEQYNSTYRVVSVLTVLHQDWLNGKEYKCKVSNKALPAPIEKTISKAKGQPREPQVYTLPPSRDELTKNQVSLTCLVKGFYPSDIAVEWESNGQPENNYKTTPPVLDCDGSFFLYSKLTVDKSRWQQGNVFSCSVMHEALHNHYTQKSLSLSPGK

SEQ ID NO: 254 - protein, 330 aa, Artificial Sequence; identical to SEQ ID NO: 253
  IgG1_FC1_S400C

SEQ ID NO: 255 - protein, 330 aa, Artificial Sequence; identical to SEQ ID NO: 252
  IgG1_FC2_N390'C

SEQ ID NO: 256 - protein, 330 aa, Artificial Sequence
  IgG1_FC1_K392C
ASTKGPSVFPLAPSSKSTSGGTAALGCLVKDYFPEPVTVSWNSGALTSGVHTFPAVLQSSGLYSLSSVVTVPSSSLGTQTYICNVNHKPSNTKVDKKVEPKSCDKTHTCPPCPAPELLGGPSVFLFPPKPKDTLMISRTPEVTCVVVDVSHEDPEVKFNWYVDGVEVHNAKTKPREEQYNSTYRVVSVLTVLHQDWLNGKEYKCKVSNKALPAPIEKTISKAKGQPREPQVYTLPPSRDELTKNQVSLTCLVKGFYPSDIAVEWESNGQPENNYCTTPPVLDSDGSFFLYSKLTVDKSRWQQGNVFSCSVMHEALHNHYTQKSLSLSPGK

SEQ ID NO: 257 - protein, 330 aa, Artificial Sequence
  IgG1_FC2_V397'C
ASTKGPSVFPLAPSSKSTSGGTAALGCLVKDYFPEPVTVSWNSGALTSGVHTFPAVLQSSGLYSLSSVVTVPSSSLGTQTYICNVNHKPSNTKVDKKVEPKSCDKTHTCPPCPAPELLGGPSVFLFPPKPKDTLMISRTPEVTCVVVDVSHEDPEVKFNWYVDGVEVHNAKTKPREEQYNSTYRVVSVLTVLHQDWLNGKEYKCKVSNKALPAPIEKTISKAKGQPREPQVYTLPPSRDELTKNQVSLTCLVKGFYPSDIAVEWESNGQPENNYKTTPPCLDSDGSFFLYSKLTVDKSRWQQGNVFSCSVMHEALHNHYTQKSLSLSPGK

SEQ ID NO: 258 - protein, 330 aa, Artificial Sequence; identical to SEQ ID NO: 257
  IgG1_FC1_V397C

SEQ ID NO: 259 - protein, 330 aa, Artificial Sequence; identical to SEQ ID NO: 256
  IgG1_FC2_K392'C

SEQ ID NO: 260 - protein, 330 aa, Artificial Sequence; identical to SEQ ID NO: 256
  IgG1_FC1_K392C

SEQ ID NO: 261 - protein, 330 aa, Artificial Sequence; identical to SEQ ID NO: 253
  IgG1_FC2_S400'C

SEQ ID NO: 262 - protein, 330 aa, Artificial Sequence; identical to SEQ ID NO: 253
  IgG1_FC1_S400C

SEQ ID NO: 263 - protein, 330 aa, Artificial Sequence; identical to SEQ ID NO: 256
  IgG1_FC2_K392'C

SEQ ID NO: 264 - protein, 330 aa, Artificial Sequence
  IgG1_FC1_E357K:T411K
ASTKGPSVFPLAPSSKSTSGGTAALGCLVKDYFPEPVTVSWNSGALTSGVHTFPAVLQSSGLYSLSSVVTVPSSSLGTQTYICNVNHKPSNTKVDKKVEPKSCDKTHTCPPCPAPELLGGPSVFLFPPKPKDTLMISRTPEVTCVVVDVSHEDPEVKFNWYVDGVEVHNAKTKPREEQYNSTYRVVSVLTVLHQDWLNGKEYKCKVSNKALPAPIEKTISKAKGQPREPQVYTLPPSRDKLTKNQVSLTCLVKGFYPSDIAVEWESNGQPENNYKTTPPVLDSDGSFFLYSKLKVDKSRWQQGNVFSCSVMHEALHNHYTQKSLSLSPGK

SEQ ID NO: 265 - protein, 330 aa, Artificial Sequence
  IgG1_FC2_L351'D:K370'D
ASTKGPSVFPLAPSSKSTSGGTAALGCLVKDYFPEPVTVSWNSGALTSGVHTFPAVLQSSGLYSLSSVVTVPSSSLGTQTYICNVNHKPSNTKVDKKVEPKSCDKTHTCPPCPAPELLGGPSVFLFPPKPKDTLMISRTPEVTCVVVDVSHEDPEVKFNWYVDGVEVHNAKTKPREEQYNSTYRVVSVLTVLHQDWLNGKEYKCKVSNKALPAPIEKTISKAKGQPREPQVYTDPPSRDELTKNQVSLTCLVDGFYPSDIAVEWESNGQPENNYKTTPPVLDSDGSFFLYSKLTVDKSRWQQGNVFSCSVMHEALHNHYTQKSLSLSPGK

SEQ ID NO: 266 - protein, 330 aa, Artificial Sequence
  IgG1_FC1_E357K:S364K
ASTKGPSVFPLAPSSKSTSGGTAALGCLVKDYFPEPVTVSWNSGALTSGVHTFPAVLQSSGLYSLSSVVTVPSSSLGTQTYICNVNHKPSNTKVDKKVEPKSCDKTHTCPPCPAPELLGGPSVFLFPPKPKDTLMISRTPEVTCVVVDVSHEDPEVKFNWYVDGVEVHNAKTKPREEQYNSTYRVVSVLTVLHQDWLNGKEYKCKVSNKALPAPIEKTISKAKGQPREPQVYTLPPSRDKLTKNQVKLTCLVKGFYPSDIAVEWESNGQPENNYKTTPPVLDSDGSFFLYSKLTVDKSRWQQGNVFSCSVMHEALHNHYTQKSLSLSPGK

SEQ ID NO: 267 - protein, 330 aa, Artificial Sequence; identical to SEQ ID NO: 265
  IgG1_FC2_L351'D:K370'D

SEQ ID NO: 268 - protein, 330 aa, Artificial Sequence
  IgG1_FC1_D356K:E357K:S364K
ASTKGPSVFPLAPSSKSTSGGTAALGCLVKDYFPEPVTVSWNSGALTSGVHTFPAVLQSSGLYSLSSVVTVPSSSLGTQTYICNVNHKPSNTKVDKKVEPKSCDKTHTCPPCPAPELLGGPSVFLFPPKPKDTLMISRTPEVTCVVVDVSHEDPEVKFNWYVDGVEVHNAKTKPREEQYNSTYRVVSVLTVLHQDWLNGKEYKCKVSNKALPAPIEKTISKAKGQPREPQVYTLPPSRKKLTKNQVKLTCLVKGFYPSDIAVEWESNGQPENNYKTTPPVLDSDGSFFLYSKLTVDKSRWQQGNVFSCSVMHEALHNHYTQKSLSLSPGK

SEQ ID NO: 269 - protein, 330 aa, Artificial Sequence
  IgG1_FC2_L351'D:K370'D:K439'D
ASTKGPSVFPLAPSSKSTSGGTAALGCLVKDYFPEPVTVSWNSGALTSGVHTFPAVLQSSGLYSLSSVVTVPSSSLGTQTYICNVNHKPSNTKVDKKVEPKSCDKTHTCPPCPAPELLGGPSVFLFPPKPKDTLMISRTPEVTCVVVDVSHEDPEVKFNWYVDGVEVHNAKTKPREEQYNSTYRVVSVLTVLHQDWLNGKEYKCKVSNKALPAPIEKTISKAKGQPREPQVYTDPPSRDELTKNQVSLTCLVDGFYPSDIAVEWESNGQPENNYKTTPPVLDSDGSFFLYSKLTVDKSRWQQGNVFSCSVMHEALHNHYTQDSLSLSPGK

SEQ ID NO: 270 - protein, 330 aa, Artificial Sequence
  IgG1_FC1_E357K:S364K:N390C
ASTKGPSVFPLAPSSKSTSGGTAALGCLVKDYFPEPVTVSWNSGALTSGVHTFPAVLQSSGLYSLSSVVTVPSSSLGTQTYICNVNHKPSNTKVDKKVEPKSCDKTHTCPPCPAPELLGGPSVFLFPPKPKDTLMISRTPEVTCVVVDVSHEDPEVKFNWYVDGVEVHNAKTKPREEQYNSTYRVVSVLTVLHQDWLNGKEYKCKVSNKALPAPIEKTISKAKGQPREPQVYTLPPSRDKLTKNQVKLTCLVKGFYPSDIAVEWESNGQPENCYKTTPPVLDSDGSFFLYSKLTVDKSRWQQGNVFSCSVMHEALHNHYTQKSLSLSPGK

SEQ ID NO: 271 - protein, 330 aa, Artificial Sequence
  IgG1_FC2_L351'D:K370'D:S400'C
ASTKGPSVFPLAPSSKSTSGGTAALGCLVKDYFPEPVTVSWNSGALTSGVHTFPAVLQSSGLYSLSSVVTVPSSSLGTQTYICNVNHKPSNTKVDKKVEPKSCDKTHTCPPCPAPELLGGPSVFLFPPKPKDTLMISRTPEVTCVVVDVSHEDPEVKFNWYVDGVEVHNAKTKPREEQYNSTYRVVSVLTVLHQDWLNGKEYKCKVSNKALPAPIEKTISKAKGQPREPQVYTDPPSRDELTKNQVSLTCLVDGFYPSDIAVEWESNGQPENNYKTTPPVLDCDGSFFLYSKLTVDKSRWQQGNVFSCSVMHEALHNHYTQKSLSLSPGK

SEQ ID NO: 272 - protein, 330 aa, Artificial Sequence
  IgG1_FC1_E357K:S364K:S400C
ASTKGPSVFPLAPSSKSTSGGTAALGCLVKDYFPEPVTVSWNSGALTSGVHTFPAVLQSSGLYSLSSVVTVPSSSLGTQTYICNVNHKPSNTKVDKKVEPKSCDKTHTCPPCPAPELLGGPSVFLFPPKPKDTLMISRTPEVTCVVVDVSHEDPEVKFNWYVDGVEVHNAKTKPREEQYNSTYRVVSVLTVLHQDWLNGKEYKCKVSNKALPAPIEKTISKAKGQPREPQVYTLPPSRDKLTKNQVKLTCLVKGFYPSDIAVEWESNGQPENNYKTTPPVLDCDGSFFLYSKLTVDKSRWQQGNVFSCSVMHEALHNHYTQKSLSLSPGK

SEQ ID NO: 273 - protein, 330 aa, Artificial Sequence
  IgG1_FC2_L351'D:K370'D:N390'C
ASTKGPSVFPLAPSSKSTSGGTAALGCLVKDYFPEPVTVSWNSGALTSGVHTFPAVLQSSGLYSLSSVVTVPSSSLGTQTYICNVNHKPSNTKVDKKVEPKSCDKTHTCPPCPAPELLGGPSVFLFPPKPKDTLMISRTPEVTCVVVDVSHEDPEVKFNWYVDGVEVHNAKTKPREEQYNSTYRVVSVLTVLHQDWLNGKEYKCKVSNKALPAPIEKTISKAKGQPREPQVYTDPPSRDELTKNQVSLTCLVDGFYPSDIAVEWESNGQPENCYKTTPPVLDSDGSFFLYSKLTVDKSRWQQGNVFSCSVMHEALHNHYTQKSLSLSPGK

SEQ ID NO: 274 - protein, 330 aa, Artificial Sequence
  IgG1_FC1_D356K:E357K:S364K:N390C
ASTKGPSVFPLAPSSKSTSGGTAALGCLVKDYFPEPVTVSWNSGALTSGVHTFPAVLQSSGLYSLSSVVTVPSSSLGTQTYICNVNHKPSNTKVDKKVEPKSCDKTHTCPPCPAPELLGGPSVFLFPPKPKDTLMISRTPEVTCVVVDVSHEDPEVKFNWYVDGVEVHNAKTKPREEQYNSTYRVVSVLTVLHQDWLNGKEYKCKVSNKALPAPIEKTISKAKGQPREPQVYTLPPSRKKLTKNQVKLTCLVKGFYPSDIAVEWESNGQPENCYKTTPPVLDSDGSFFLYSKLTVDKSRWQQGNVFSCSVMHEALHNHYTQKSLSLSPGK

SEQ ID NO: 275 - protein, 330 aa, Artificial Sequence
  IgG1_FC2_L351'D:K370'D:S400'C:K439'D
ASTKGPSVFPLAPSSKSTSGGTAALGCLVKDYFPEPVTVSWNSGALTSGVHTFPAVLQSSGLYSLSSVVTVPSSSLGTQTYICNVNHKPSNTKVDKKVEPKSCDKTHTCPPCPAPELLGGPSVFLFPPKPKDTLMISRTPEVTCVVVDVSHEDPEVKFNWYVDGVEVHNAKTKPREEQYNSTYRVVSVLTVLHQDWLNGKEYKCKVSNKALPAPIEKTISKAKGQPREPQVYTDPPSRDELTKNQVSLTCLVDGFYPSDIAVEWESNGQPENNYKTTPPVLDCDGSFFLYSKLTVDKSRWQQGNVFSCSVMHEALHNHYTQDSLSLSPGK

SEQ ID NO: 276 - protein, 330 aa, Artificial Sequence
  IgG1_FC1_D356K:E357K:S364K:S400C
ASTKGPSVFPLAPSSKSTSGGTAALGCLVKDYFPEPVTVSWNSGALTSGVHTFPAVLQSSGLYSLSSVVTVPSSSLGTQTYICNVNHKPSNTKVDKKVEPKSCDKTHTCPPCPAPELLGGPSVFLFPPKPKDTLMISRTPEVTCVVVDVSHEDPEVKFNWYVDGVEVHNAKTKPREEQYNSTYRVVSVLTVLHQDWLNGKEYKCKVSNKALPAPIEKTISKAKGQPREPQVYTLPPSRKKLTKNQVKLTCLVKGFYPSDIAVEWESNGQPENNYKTTPPVLDCDGSFFLYSKLTVDKSRWQQGNVFSCSVMHEALHNHYTQKSLSLSPGK

SEQ ID NO: 277 - protein, 330 aa, Artificial Sequence
  IgG1_FC2_L351'D:K370'D:N390'C:K439'D
ASTKGPSVFPLAPSSKSTSGGTAALGCLVKDYFPEPVTVSWNSGALTSGVHTFPAVLQSSGLYSLSSVVTVPSSSLGTQTYICNVNHKPSNTKVDKKVEPKSCDKTHTCPPCPAPELLGGPSVFLFPPKPKDTLMISRTPEVTCVVVDVSHEDPEVKFNWYVDGVEVHNAKTKPREEQYNSTYRVVSVLTVLHQDWLNGKEYKCKVSNKALPAPIEKTISKAKGQPREPQVYTDPPSRDELTKNQVSLTCLVDGFYPSDIAVEWESNGQPENCYKTTPPVLDSDGSFFLYSKLTVDKSRWQQGNVFSCSVMHEALHNHYTQDSLSLSPGK

SEQ ID NO: 278 - protein, 330 aa, Artificial Sequence
  IgG1_FC1_T366S,L368A,Y407V,N390C
ASTKGPSVFPLAPSSKSTSGGTAALGCLVKDYFPEPVTVSWNSGALTSGVHTFPAVLQSSGLYSLSSVVTVPSSSLGTQTYICNVNHKPSNTKVDKKVEPKSCDKTHTCPPCPAPELLGGPSVFLFPPKPKDTLMISRTPEVTCVVVDVSHEDPEVKFNWYVDGVEVHNAKTKPREEQYNSTYRVVSVLTVLHQDWLNGKEYKCKVSNKALPAPIEKTISKAKGQPREPQVYTLPPSRDELTKNQVSLSCAVKGFYPSDIAVEWESNGQPENCYKTTPPVLDSDGSFFLVSKLTVDKSRWQQGNVFSCSVMHEALHNHYTQKSLSLSPGK

SEQ ID NO: 279 - protein, 330 aa, Artificial Sequence
  IgG1_FC2_T366'W,S400'C
ASTKGPSVFPLAPSSKSTSGGTAALGCLVKDYFPEPVTVSWNSGALTSGVHTFPAVLQSSGLYSLSSVVTVPSSSLGTQTYICNVNHKPSNTKVDKKVEPKSCDKTHTCPPCPAPELLGGPSVFLFPPKPKDTLMISRTPEVTCVVVDVSHEDPEVKFNWYVDGVEVHNAKTKPREEQYNSTYRVVSVLTVLHQDWLNGKEYKCKVSNKALPAPIEKTISKAKGQPREPQVYTLPPSRDELTKNQVSLWCLVKGFYPSDIAVEWESNGQPENNYKTTPPVLDCDGSFFLYSKLTVDKSRWQQGNVFSCSVMHEALHNHYTQKSLSLSPGK

SEQ ID NO: 280 - protein, 330 aa, Artificial Sequence
  IgG1_FC1_T366S,L368A,Y407V,S400C
ASTKGPSVFPLAPSSKSTSGGTAALGCLVKDYFPEPVTVSWNSGALTSGVHTFPAVLQSSGLYSLSSVVTVPSSSLGTQTYICNVNHKPSNTKVDKKVEPKSCDKTHTCPPCPAPELLGGPSVFLFPPKPKDTLMISRTPEVTCVVVDVSHEDPEVKFNWYVDGVEVHNAKTKPREEQYNSTYRVVSVLTVLHQDWLNGKEYKCKVSNKALPAPIEKTISKAKGQPREPQVYTLPPSRDELTKNQVSLSCAVKGFYPSDIAVEWESNGQPENNYKTTPPVLDCDGSFFLVSKLTVDKSRWQQGNVFSCSVMHEALHNHYTQKSLSLSPGK

SEQ ID NO: 281 - protein, 330 aa, Artificial Sequence
  IgG1_FC2_T366'W,N390'C
ASTKGPSVFPLAPSSKSTSGGTAALGCLVKDYFPEPVTVSWNSGALTSGVHTFPAVLQSSGLYSLSSVVTVPSSSLGTQTYICNVNHKPSNTKVDKKVEPKSCDKTHTCPPCPAPELLGGPSVFLFPPKPKDTLMISRTPEVTCVVVDVSHEDPEVKFNWYVDGVEVHNAKTKPREEQYNSTYRVVSVLTVLHQDWLNGKEYKCKVSNKALPAPIEKTISKAKGQPREPQVYTLPPSRDELTKNQVSLWCLVKGFYPSDIAVEWESNGQPENCYKTTPPVLDSDGSFFLYSKLTVDKSRWQQGNVFSCSVMHEALHNHYTQKSLSLSPGK

SEQ ID NO: 282 - protein, 330 aa, Artificial Sequence
  IgG1_FC1_Y349C,L368V,Y407V
ASTKGPSVFPLAPSSKSTSGGTAALGCLVKDYFPEPVTVSWNSGALTSGVHTFPAVLQSSGLYSLSSVVTVPSSSLGTQTYICNVNHKPSNTKVDKKVEPKSCDKTHTCPPCPAPELLGGPSVFLFPPKPKDTLMISRTPEVTCVVVDVSHEDPEVKFNWYVDGVEVHNAKTKPREEQYNSTYRVVSVLTVLHQDWLNGKEYKCKVSNKALPAPIEKTISKAKGQPREPQVCTLPPSRDELTKNQVSLTCVVKGFYPSDIAVEWESNGQPENNYKTTPPVLDSDGSFFLVSKLTVDKSRWQQGNVFSCSVMHEALHNHYTQKSLSLSPGK

SEQ ID NO: 283 - protein, 330 aa, Artificial Sequence
  IgG1_FC2_S354'C,T366'W
ASTKGPSVFPLAPSSKSTSGGTAALGCLVKDYFPEPVTVSWNSGALTSGVHTFPAVLQSSGLYSLSSVVTVPSSSLGTQTYICNVNHKPSNTKVDKKVEPKSCDKTHTCPPCPAPELLGGPSVFLFPPKPKDTLMISRTPEVTCVVVDVSHEDPEVKFNWYVDGVEVHNAKTKPREEQYNSTYRVVSVLTVLHQDWLNGKEYKCKVSNKALPAPIEKTISKAKGQPREPQVYTLPPCRDELTKNQVSLWCLVKGFYPSDIAVEWESNGQPENNYKTTPPVLDSDGSFFLYSKLTVDKSRWQQGNVFSCSVMHEALHNHYTQKSLSLSPGK

SEQ ID NO: 284 - protein, 330 aa, Artificial Sequence
  IgG1_FC1_L368V,Y407V
ASTKGPSVFPLAPSSKSTSGGTAALGCLVKDYFPEPVTVSWNSGALTSGVHTFPAVLQSSGLYSLSSVVTVPSSSLGTQTYICNVNHKPSNTKVDKKVEPKSCDKTHTCPPCPAPELLGGPSVFLFPPKPKDTLMISRTPEVTCVVVDVSHEDPEVKFNWYVDGVEVHNAKTKPREEQYNSTYRVVSVLTVLHQDWLNGKEYKCKVSNKALPAPIEKTISKAKGQPREPQVYTLPPSRDELTKNQVSLTCVVKGFYPSDIAVEWESNGQPENNYKTTPPVLDSDGSFFLVSKLTVDKSRWQQGNVFSCSVMHEALHNHYTQKSLSLSPGK

SEQ ID NO: 285 - protein, 330 aa, Artificial Sequence
  IgG1_FC2_T366'W
ASTKGPSVFPLAPSSKSTSGGTAALGCLVKDYFPEPVTVSWNSGALTSGVHTFPAVLQSSGLYSLSSVVTVPSSSLGTQTYICNVNHKPSNTKVDKKVEPKSCDKTHTCPPCPAPELLGGPSVFLFPPKPKDTLMISRTPEVTCVVVDVSHEDPEVKFNWYVDGVEVHNAKTKPREEQYNSTYRVVSVLTVLHQDWLNGKEYKCKVSNKALPAPIEKTISKAKGQPREPQVYTLPPSRDELTKNQVSLWCLVKGFYPSDIAVEWESNGQPENNYKTTPPVLDSDGSFFLYSKLTVDKSRWQQGNVFSCSVMHEALHNHYTQKSLSLSPGK

SEQ ID NO: 286 - protein, 330 aa, Artificial Sequence
  IgG1_FC1_L368V,Y407V,N390C
ASTKGPSVFPLAPSSKSTSGGTAALGCLVKDYFPEPVTVSWNSGALTSGVHTFPAVLQSSGLYSLSSVVTVPSSSLGTQTYICNVNHKPSNTKVDKKVEPKSCDKTHTCPPCPAPELLGGPSVFLFPPKPKDTLMISRTPEVTCVVVDVSHEDPEVKFNWYVDGVEVHNAKTKPREEQYNSTYRVVSVLTVLHQDWLNGKEYKCKVSNKALPAPIEKTISKAKGQPREPQVYTLPPSRDELTKNQVSLTCVVKGFYPSDIAVEWESNGQPENCYKTTPPVLDSDGSFFLVSKLTVDKSRWQQGNVFSCSVMHEALHNHYTQKSLSLSPGK

SEQ ID NO: 287 - protein, 330 aa, Artificial Sequence; identical to SEQ ID NO: 279
  IgG1_FC2_T366'W,S400'C

SEQ ID NO: 288 - protein, 330 aa, Artificial Sequence
  IgG1_FC1_L368V,Y407V,S400C
ASTKGPSVFPLAPSSKSTSGGTAALGCLVKDYFPEPVTVSWNSGALTSGVHTFPAVLQSSGLYSLSSVVTVPSSSLGTQTYICNVNHKPSNTKVDKKVEPKSCDKTHTCPPCPAPELLGGPSVFLFPPKPKDTLMISRTPEVTCVVVDVSHEDPEVKFNWYVDGVEVHNAKTKPREEQYNSTYRVVSVLTVLHQDWLNGKEYKCKVSNKALPAPIEKTISKAKGQPREPQVYTLPPSRDELTKNQVSLTCVVKGFYPSDIAVEWESNGQPENNYKTTPPVLDCDGSFFLVSKLTVDKSRWQQGNVFSCSVMHEALHNHYTQKSLSLSPGK

SEQ ID NO: 289 - protein, 330 aa, Artificial Sequence; identical to SEQ ID NO: 281
  IgG1_FC2_T366'W,N390'C

SEQ ID NO: 290 - protein, 330 aa, Artificial Sequence
  IgG1_FC1_S390C
ASTKGPSVFPLAPSSKSTSGGTAALGCLVKDYFPEPVTVSWNSGALTSGVHTFPAVLQSSGLYSLSSVVTVPSSSLGTQTYICNVNHKPSNTKVDKKVEPKSCDKTHTCPPCPAPELLGGPSVFLFPPKPKDTLMISRTPEVTCVVVDVSHEDPEVKFNWYVDGVEVHNAKTKPREEQYNSTYRVVSVLTVLHQDWLNGKEYKCKVSNKALPAPIEKTISKAKGQPREPQVYTLPPSREEMTKNQVSLTCLVKGFYPSDIAVEWESNGQPENCYKTTPPVLDSDGSFFLYSKLTVDKSRWQQGNVFSCSVMHEALHNHYTQKSLSLSPGK

SEQ ID NO: 291 - protein, 330 aa, Artificial Sequence
  IgG1_FC2_S400'C
ASTKGPSVFPLAPSSKSTSGGTAALGCLVKDYFPEPVTVSWNSGALTSGVHTFPAVLQSSGLYSLSSVVTVPSSSLGTQTYICNVNHKPSNTKVDKKVEPKSCDKTHTCPPCPAPELLGGPSVFLFPPKPKDTLMISRTPEVTCVVVDVSHEDPEVKFNWYVDGVEVHNAKTKPREEQYNSTYRVVSVLTVLHQDWLNGKEYKCKVSNKALPAPIEKTISKAKGQPREPQVYTLPPSREEMTKNQVSLTCLVKGFYPSDIAVEWESNGQPENNYKTTPPVLDCDGSFFLYSKLTVDKSRWQQGNVFSCSVMHEALHNHYTQKSLSLSPGK

SEQ ID NO: 292 - protein, 330 aa, Artificial Sequence; identical to SEQ ID NO: 291
  IgG1_FC1_S400C

SEQ ID NO: 293 - protein, 330 aa, Artificial Sequence; identical to SEQ ID NO: 290
  IgG1_FC2_N390'C

SEQ ID NO: 294 - protein, 330 aa, Artificial Sequence
  IgG1_FC1_K392C
ASTKGPSVFPLAPSSKSTSGGTAALGCLVKDYFPEPVTVSWNSGALTSGVHTFPAVLQSSGLYSLSSVVTVPSSSLGTQTYICNVNHKPSNTKVDKKVEPKSCDKTHTCPPCPAPELLGGPSVFLFPPKPKDTLMISRTPEVTCVVVDVSHEDPEVKFNWYVDGVEVHNAKTKPREEQYNSTYRVVSVLTVLHQDWLNGKEYKCKVSNKALPAPIEKTISKAKGQPREPQVYTLPPSREEMTKNQVSLTCLVKGFYPSDIAVEWESNGQPENNYCTTPPVLDSDGSFFLYSKLTVDKSRWQQGNVFSCSVMHEALHNHYTQKSLSLSPGK

SEQ ID NO: 295 - protein, 330 aa, Artificial Sequence
  IgG1_FC2_V397'C
ASTKGPSVFPLAPSSKSTSGGTAALGCLVKDYFPEPVTVSWNSGALTSGVHTFPAVLQSSGLYSLSSVVTVPSSSLGTQTYICNVNHKPSNTKVDKKVEPKSCDKTHTCPPCPAPELLGGPSVFLFPPKPKDTLMISRTPEVTCVVVDVSHEDPEVKFNWYVDGVEVHNAKTKPREEQYNSTYRVVSVLTVLHQDWLNGKEYKCKVSNKALPAPIEKTISKAKGQPREPQVYTLPPSREEMTKNQVSLTCLVKGFYPSDIAVEWESNGQPENNYKTTPPCLDSDGSFFLYSKLTVDKSRWQQGNVFSCSVMHEALHNHYTQKSLSLSPGK

SEQ ID NO: 296 - protein, 330 aa, Artificial Sequence; identical to SEQ ID NO: 295
  IgG1_FC1_V397C

SEQ ID NO: 297 - protein, 330 aa, Artificial Sequence; identical to SEQ ID NO: 294
  IgG1_FC2_K392'C

SEQ ID NO: 298 - protein, 330 aa, Artificial Sequence; identical to SEQ ID NO: 294
  IgG1_FC1_K392C

SEQ ID NO: 299 - protein, 330 aa, Artificial Sequence; identical to SEQ ID NO: 291
  IgG1_FC2_S400'C

SEQ ID NO: 300 - protein, 330 aa, Artificial Sequence; identical to SEQ ID NO: 291
  IgG1_FC1_S400C

SEQ ID NO: 301 - protein, 330 aa, Artificial Sequence; identical to SEQ ID NO: 294
  IgG1_FC2_K392'C

SEQ ID NO: 302 - protein, 330 aa, Artificial Sequence
  IgG1_FC1_E357K:T411K
ASTKGPSVFPLAPSSKSTSGGTAALGCLVKDYFPEPVTVSWNSGALTSGVHTFPAVLQSSGLYSLSSVVTVPSSSLGTQTYICNVNHKPSNTKVDKKVEPKSCDKTHTCPPCPAPELLGGPSVFLFPPKPKDTLMISRTPEVTCVVVDVSHEDPEVKFNWYVDGVEVHNAKTKPREEQYNSTYRVVSVLTVLHQDWLNGKEYKCKVSNKALPAPIEKTISKAKGQPREPQVYTLPPSREKMTKNQVSLTCLVKGFYPSDIAVEWESNGQPENNYKTTPPVLDSDGSFFLYSKLKVDKSRWQQGNVFSCSVMHEALHNHYTQKSLSLSPGK

SEQ ID NO: 303 - protein, 330 aa, Artificial Sequence
  IgG1_FC2_L351'D:K370'D
ASTKGPSVFPLAPSSKSTSGGTAALGCLVKDYFPEPVTVSWNSGALTSGVHTFPAVLQSSGLYSLSSVVTVPSSSLGTQTYICNVNHKPSNTKVDKKVEPKSCDKTHTCPPCPAPELLGGPSVFLFPPKPKDTLMISRTPEVTCVVVDVSHEDPEVKFNWYVDGVEVHNAKTKPREEQYNSTYRVVSVLTVLHQDWLNGKEYKCKVSNKALPAPIEKTISKAKGQPREPQVYTDPPSREEMTKNQVSLTCLVDGFYPSDIAVEWESNGQPENNYKTTPPVLDSDGSFFLYSKLTVDKSRWQQGNVFSCSVMHEALHNHYTQKSLSLSPGK

SEQ ID NO: 304 - protein, 330 aa, Artificial Sequence
  IgG1_FC1_E357K:S364K
ASTKGPSVFPLAPSSKSTSGGTAALGCLVKDYFPEPVTVSWNSGALTSGVHTFPAVLQSSGLYSLSSVVTVPSSSLGTQTYICNVNHKPSNTKVDKKVEPKSCDKTHTCPPCPAPELLGGPSVFLFPPKPKDTLMISRTPEVTCVVVDVSHEDPEVKFNWYVDGVEVHNAKTKPREEQYNSTYRVVSVLTVLHQDWLNGKEYKCKVSNKALPAPIEKTISKAKGQPREPQVYTLPPSREKMTKNQVKLTCLVKGFYPSDIAVEWESNGQPENNYKTTPPVLDSDGSFFLYSKLTVDKSRWQQGNVFSCSVMHEALHNHYTQKSLSLSPGK

SEQ ID NO: 305 - protein, 330 aa, Artificial Sequence; identical to SEQ ID NO: 303
  IgG1_FC2_L351'D:K370'D

SEQ ID NO: 306 - protein, 330 aa, Artificial Sequence
  IgG1_FC1_E356K:E357K:S364K
ASTKGPSVFPLAPSSKSTSGGTAALGCLVKDYFPEPVTVSWNSGALTSGVHTFPAVLQSSGLYSLSSVVTVPSSSLGTQTYICNVNHKPSNTKVDKKVEPKSCDKTHTCPPCPAPELLGGPSVFLFPPKPKDTLMISRTPEVTCVVVDVSHEDPEVKFNWYVDGVEVHNAKTKPREEQYNSTYRVVSVLTVLHQDWLNGKEYKCKVSNKALPAPIEKTISKAKGQPREPQVYTLPPSRKKMTKNQVKLTCLVKGFYPSDIAVEWESNGQPENNYKTTPPVLDSDGSFFLYSKLTVDKSRWQQGNVFSCSVMHEALHNHYTQKSLSLSPGK

SEQ ID NO: 307 - protein, 330 aa, Artificial Sequence
  IgG1_FC2_L351'D:K370'D:K439'D
ASTKGPSVFPLAPSSKSTSGGTAALGCLVKDYFPEPVTVSWNSGALTSGVHTFPAVLQSSGLYSLSSVVTVPSSSLGTQTYICNVNHKPSNTKVDKKVEPKSCDKTHTCPPCPAPELLGGPSVFLFPPKPKDTLMISRTPEVTCVVVDVSHEDPEVKFNWYVDGVEVHNAKTKPREEQYNSTYRVVSVLTVLHQDWLNGKEYKCKVSNKALPAPIEKTISKAKGQPREPQVYTDPPSREEMTKNQVSLTCLVDGFYPSDIAVEWESNGQPENNYKTTPPVLDSDGSFFLYSKLTVDKSRWQQGNVFSCSVMHEALHNHYTQDSLSLSPGK

SEQ ID NO: 308 - protein, 330 aa, Artificial Sequence
  IgG1_FC1_E357K:S364K:N390C
ASTKGPSVFPLAPSSKSTSGGTAALGCLVKDYFPEPVTVSWNSGALTSGVHTFPAVLQSSGLYSLSSVVTVPSSSLGTQTYICNVNHKPSNTKVDKKVEPKSCDKTHTCPPCPAPELLGGPSVFLFPPKPKDTLMISRTPEVTCVVVDVSHEDPEVKFNWYVDGVEVHNAKTKPREEQYNSTYRVVSVLTVLHQDWLNGKEYKCKVSNKALPAPIEKTISKAKGQPREPQVYTLPPSREKMTKNQVKLTCLVKGFYPSDIAVEWESNGQPENCYKTTPPVLDSDGSFFLYSKLTVDKSRWQQGNVFSCSVMHEALHNHYTQKSLSLSPGK

SEQ ID NO: 309 - protein, 330 aa, Artificial Sequence
  IgG1_FC2_L351'D:K370'D:S400'C
ASTKGPSVFPLAPSSKSTSGGTAALGCLVKDYFPEPVTVSWNSGALTSGVHTFPAVLQSSGLYSLSSVVTVPSSSLGTQTYICNVNHKPSNTKVDKKVEPKSCDKTHTCPPCPAPELLGGPSVFLFPPKPKDTLMISRTPEVTCVVVDVSHEDPEVKFNWYVDGVEVHNAKTKPREEQYNSTYRVVSVLTVLHQDWLNGKEYKCKVSNKALPAPIEKTISKAKGQPREPQVYTDPPSREEMTKNQVSLTCLVDGFYPSDIAVEWESNGQPENNYKTTPPVLDCDGSFFLYSKLTVDKSRWQQGNVFSCSVMHEALHNHYTQKSLSLSPGK

SEQ ID NO: 310 - protein, 330 aa, Artificial Sequence
  IgG1_FC1_E357K:S364K:S400C
ASTKGPSVFPLAPSSKSTSGGTAALGCLVKDYFPEPVTVSWNSGALTSGVHTFPAVLQSSGLYSLSSVVTVPSSSLGTQTYICNVNHKPSNTKVDKKVEPKSCDKTHTCPPCPAPELLGGPSVFLFPPKPKDTLMISRTPEVTCVVVDVSHEDPEVKFNWYVDGVEVHNAKTKPREEQYNSTYRVVSVLTVLHQDWLNGKEYKCKVSNKALPAPIEKTISKAKGQPREPQVYTLPPSREKMTKNQVKLTCLVKGFYPSDIAVEWESNGQPENNYKTTPPVLDCDGSFFLYSKLTVDKSRWQQGNVFSCSVMHEALHNHYTQKSLSLSPGK

SEQ ID NO: 311 - protein, 330 aa, Artificial Sequence
  IgG1_FC2_L351'D:K370'D:N390'C
ASTKGPSVFPLAPSSKSTSGGTAALGCLVKDYFPEPVTVSWNSGALTSGVHTFPAVLQSSGLYSLSSVVTVPSSSLGTQTYICNVNHKPSNTKVDKKVEPKSCDKTHTCPPCPAPELLGGPSVFLFPPKPKDTLMISRTPEVTCVVVDVSHEDPEVKFNWYVDGVEVHNAKTKPREEQYNSTYRVVSVLTVLHQDWLNGKEYKCKVSNKALPAPIEKTISKAKGQPREPQVYTDPPSREEMTKNQVSLTCLVDGFYPSDIAVEWESNGQPENCYKTTPPVLDSDGSFFLYSKLTVDKSRWQQGNVFSCSVMHEALHNHYTQKSLSLSPGK

SEQ ID NO: 312 - protein, 330 aa, Artificial Sequence
  IgG1_FC1_E356K:E357K:S364K:N390C
ASTKGPSVFPLAPSSKSTSGGTAALGCLVKDYFPEPVTVSWNSGALTSGVHTFPAVLQSSGLYSLSSVVTVPSSSLGTQTYICNVNHKPSNTKVDKKVEPKSCDKTHTCPPCPAPELLGGPSVFLFPPKPKDTLMISRTPEVTCVVVDVSHEDPEVKFNWYVDGVEVHNAKTKPREEQYNSTYRVVSVLTVLHQDWLNGKEYKCKVSNKALPAPIEKTISKAKGQPREPQVYTLPPSRKKMTKNQVKLTCLVKGFYPSDIAVEWESNGQPENCYKTTPPVLDSDGSFFLYSKLTVDKSRWQQGNVFSCSVMHEALHNHYTQKSLSLSPGK

SEQ ID NO: 313 - protein, 330 aa, Artificial Sequence
  IgG1_FC2_L351'D:K370'D:S400'C:K439'D
ASTKGPSVFPLAPSSKSTSGGTAALGCLVKDYFPEPVTVSWNSGALTSGVHTFPAVLQSSGLYSLSSVVTVPSSSLGTQTYICNVNHKPSNTKVDKKVEPKSCDKTHTCPPCPAPELLGGPSVFLFPPKPKDTLMISRTPEVTCVVVDVSHEDPEVKFNWYVDGVEVHNAKTKPREEQYNSTYRVVSVLTVLHQDWLNGKEYKCKVSNKALPAPIEKTISKAKGQPREPQVYTDPPSREEMTKNQVSLTCLVDGFYPSDIAVEWESNGQPENNYKTTPPVLDCDGSFFLYSKLTVDKSRWQQGNVFSCSVMHEALHNHYTQDSLSLSPGK

SEQ ID NO: 314 - protein, 330 aa, Artificial Sequence
  IgG1_FC1_E356K:E357K:S364K:S400C
ASTKGPSVFPLAPSSKSTSGGTAALGCLVKDYFPEPVTVSWNSGALTSGVHTFPAVLQSSGLYSLSSVVTVPSSSLGTQTYICNVNHKPSNTKVDKKVEPKSCDKTHTCPPCPAPELLGGPSVFLFPPKPKDTLMISRTPEVTCVVVDVSHEDPEVKFNWYVDGVEVHNAKTKPREEQYNSTYRVVSVLTVLHQDWLNGKEYKCKVSNKALPAPIEKTISKAKGQPREPQVYTLPPSRKKMTKNQVKLTCLVKGFYPSDIAVEWESNGQPENNYKTTPPVLDCDGSFFLYSKLTVDKSRWQQGNVFSCSVMHEALHNHYTQKSLSLSPGK

SEQ ID NO: 315 - protein, 330 aa, Artificial Sequence
  IgG1_FC2_L351'D:K370'D:N390'C:K439'D
ASTKGPSVFPLAPSSKSTSGGTAALGCLVKDYFPEPVTVSWNSGALTSGVHTFPAVLQSSGLYSLSSVVTVPSSSLGTQTYICNVNHKPSNTKVDKKVEPKSCDKTHTCPPCPAPELLGGPSVFLFPPKPKDTLMISRTPEVTCVVVDVSHEDPEVKFNWYVDGVEVHNAKTKPREEQYNSTYRVVSVLTVLHQDWLNGKEYKCKVSNKALPAPIEKTISKAKGQPREPQVYTDPPSREEMTKNQVSLTCLVDGFYPSDIAVEWESNGQPENCYKTTPPVLDSDGSFFLYSKLTVDKSRWQQGNVFSCSVMHEALHNHYTQDSLSLSPGK

SEQ ID NO: 316 - protein, 330 aa, Artificial Sequence
  IgG1_FC1_T366S,L368A,Y407V,N390C
ASTKGPSVFPLAPSSKSTSGGTAALGCLVKDYFPEPVTVSWNSGALTSGVHTFPAVLQSSGLYSLSSVVTVPSSSLGTQTYICNVNHKPSNTKVDKKVEPKSCDKTHTCPPCPAPELLGGPSVFLFPPKPKDTLMISRTPEVTCVVVDVSHEDPEVKFNWYVDGVEVHNAKTKPREEQYNSTYRVVSVLTVLHQDWLNGKEYKCKVSNKALPAPIEKTISKAKGQPREPQVYTLPPSREEMTKNQVSLSCAVKGFYPSDIAVEWESNGQPENCYKTTPPVLDSDGSFFLVSKLTVDKSRWQQGNVFSCSVMHEALHNHYTQKSLSLSPGK

SEQ ID NO: 317 - protein, 330 aa, Artificial Sequence
  IgG1_FC2_T366'W,S400'C
ASTKGPSVFPLAPSSKSTSGGTAALGCLVKDYFPEPVTVSWNSGALTSGVHTFPAVLQSSGLYSLSSVVTVPSSSLGTQTYICNVNHKPSNTKVDKKVEPKSCDKTHTCPPCPAPELLGGPSVFLFPPKPKDTLMISRTPEVTCVVVDVSHEDPEVKFNWYVDGVEVHNAKTKPREEQYNSTYRVVSVLTVLHQDWLNGKEYKCKVSNKALPAPIEKTISKAKGQPREPQVYTLPPSREEMTKNQVSLWCLVKGFYPSDIAVEWESNGQPENNYKTTPPVLDCDGSFFLYSKLTVDKSRWQQGNVFSCSVMHEALHNHYTQKSLSLSPGK

SEQ ID NO: 318 - protein, 330 aa, Artificial Sequence
  IgG1_FC1_T366S,L368A,Y407V,S400C
ASTKGPSVFPLAPSSKSTSGGTAALGCLVKDYFPEPVTVSWNSGALTSGVHTFPAVLQSSGLYSLSSVVTVPSSSLGTQTYICNVNHKPSNTKVDKKVEPKSCDKTHTCPPCPAPELLGGPSVFLFPPKPKDTLMISRTPEVTCVVVDVSHEDPEVKFNWYVDGVEVHNAKTKPREEQYNSTYRVVSVLTVLHQDWLNGKEYKCKVSNKALPAPIEKTISKAKGQPREPQVYTLPPSREEMTKNQVSLSCAVKGFYPSDIAVEWESNGQPENNYKTTPPVLDCDGSFFLVSKLTVDKSRWQQGNVFSCSVMHEALHNHYTQKSLSLSPGK

SEQ ID NO: 319 - protein, 330 aa, Artificial Sequence
  IgG1_FC2_T366'W,N390'C
ASTKGPSVFPLAPSSKSTSGGTAALGCLVKDYFPEPVTVSWNSGALTSGVHTFPAVLQSSGLYSLSSVVTVPSSSLGTQTYICNVNHKPSNTKVDKKVEPKSCDKTHTCPPCPAPELLGGPSVFLFPPKPKDTLMISRTPEVTCVVVDVSHEDPEVKFNWYVDGVEVHNAKTKPREEQYNSTYRVVSVLTVLHQDWLNGKEYKCKVSNKALPAPIEKTISKAKGQPREPQVYTLPPSREEMTKNQVSLWCLVKGFYPSDIAVEWESNGQPENCYKTTPPVLDSDGSFFLYSKLTVDKSRWQQGNVFSCSVMHEALHNHYTQKSLSLSPGK

SEQ ID NO: 320 - protein, 330 aa, Artificial Sequence
  IgG1_FC1_Y349C,L368V,Y407V
ASTKGPSVFPLAPSSKSTSGGTAALGCLVKDYFPEPVTVSWNSGALTSGVHTFPAVLQSSGLYSLSSVVTVPSSSLGTQTYICNVNHKPSNTKVDKKVEPKSCDKTHTCPPCPAPELLGGPSVFLFPPKPKDTLMISRTPEVTCVVVDVSHEDPEVKFNWYVDGVEVHNAKTKPREEQYNSTYRVVSVLTVLHQDWLNGKEYKCKVSNKALPAPIEKTISKAKGQPREPQVCTLPPSREEMTKNQVSLTCVVKGFYPSDIAVEWESNGQPENNYKTTPPVLDSDGSFFLVSKLTVDKSRWQQGNVFSCSVMHEALHNHYTQKSLSLSPGK

SEQ ID NO: 321 - protein, 330 aa, Artificial Sequence
  IgG1_FC2_S354'C,T366'W
ASTKGPSVFPLAPSSKSTSGGTAALGCLVKDYFPEPVTVSWNSGALTSGVHTFPAVLQSSGLYSLSSVVTVPSSSLGTQTYICNVNHKPSNTKVDKKVEPKSCDKTHTCPPCPAPELLGGPSVFLFPPKPKDTLMISRTPEVTCVVVDVSHEDPEVKFNWYVDGVEVHNAKTKPREEQYNSTYRVVSVLTVLHQDWLNGKEYKCKVSNKALPAPIEKTISKAKGQPREPQVYTLPPCREEMTKNQVSLWCLVKGFYPSDIAVEWESNGQPENNYKTTPPVLDSDGSFFLYSKLTVDKSRWQQGNVFSCSVMHEALHNHYTQKSLSLSPGK

SEQ ID NO: 322 - protein, 330 aa, Artificial Sequence
  IgG1_FC1_L368V,Y407V
ASTKGPSVFPLAPSSKSTSGGTAALGCLVKDYFPEPVTVSWNSGALTSGVHTFPAVLQSSGLYSLSSVVTVPSSSLGTQTYICNVNHKPSNTKVDKKVEPKSCDKTHTCPPCPAPELLGGPSVFLFPPKPKDTLMISRTPEVTCVVVDVSHEDPEVKFNWYVDGVEVHNAKTKPREEQYNSTYRVVSVLTVLHQDWLNGKEYKCKVSNKALPAPIEKTISKAKGQPREPQVYTLPPSREEMTKNQVSLTCVVKGFYPSDIAVEWESNGQPENNYKTTPPVLDSDGSFFLVSKLTVDKSRWQQGNVFSCSVMHEALHNHYTQKSLSLSPGK

SEQ ID NO: 323 - protein, 330 aa, Artificial Sequence
  IgG1_FC2_T366'W
ASTKGPSVFPLAPSSKSTSGGTAALGCLVKDYFPEPVTVSWNSGALTSGVHTFPAVLQSSGLYSLSSVVTVPSSSLGTQTYICNVNHKPSNTKVDKKVEPKSCDKTHTCPPCPAPELLGGPSVFLFPPKPKDTLMISRTPEVTCVVVDVSHEDPEVKFNWYVDGVEVHNAKTKPREEQYNSTYRVVSVLTVLHQDWLNGKEYKCKVSNKALPAPIEKTISKAKGQPREPQVYTLPPSREEMTKNQVSLWCLVKGFYPSDIAVEWESNGQPENNYKTTPPVLDSDGSFFLYSKLTVDKSRWQQGNVFSCSVMHEALHNHYTQKSLSLSPGK

SEQ ID NO: 324 - protein, 330 aa, Artificial Sequence
  IgG1_FC1_L368V,Y407V,N390C
ASTKGPSVFPLAPSSKSTSGGTAALGCLVKDYFPEPVTVSWNSGALTSGVHTFPAVLQSSGLYSLSSVVTVPSSSLGTQTYICNVNHKPSNTKVDKKVEPKSCDKTHTCPPCPAPELLGGPSVFLFPPKPKDTLMISRTPEVTCVVVDVSHEDPEVKFNWYVDGVEVHNAKTKPREEQYNSTYRVVSVLTVLHQDWLNGKEYKCKVSNKALPAPIEKTISKAKGQPREPQVYTLPPSREEMTKNQVSLTCVVKGFYPSDIAVEWESNGQPENCYKTTPPVLDSDGSFFLVSKLTVDKSRWQQGNVFSCSVMHEALHNHYTQKSLSLSPGK

SEQ ID NO: 325 - protein, 330 aa, Artificial Sequence; identical to SEQ ID NO: 317
  IgG1_FC2_T366'W,S400'C

SEQ ID NO: 326 - protein, 330 aa, Artificial Sequence
  IgG1_FC1_L368V,Y407V,S400C
ASTKGPSVFPLAPSSKSTSGGTAALGCLVKDYFPEPVTVSWNSGALTSGVHTFPAVLQSSGLYSLSSVVTVPSSSLGTQTYICNVNHKPSNTKVDKKVEPKSCDKTHTCPPCPAPELLGGPSVFLFPPKPKDTLMISRTPEVTCVVVDVSHEDPEVKFNWYVDGVEVHNAKTKPREEQYNSTYRVVSVLTVLHQDWLNGKEYKCKVSNKALPAPIEKTISKAKGQPREPQVYTLPPSREEMTKNQVSLTCVVKGFYPSDIAVEWESNGQPENNYKTTPPVLDCDGSFFLVSKLTVDKSRWQQGNVFSCSVMHEALHNHYTQKSLSLSPGK

SEQ ID NO: 327 - protein, 330 aa, Artificial Sequence; identical to SEQ ID NO: 319
  IgG1_FC2_T366'W,N390'C

SEQ ID NO: 328 - protein, 327 aa, Artificial Sequence
  IgG4_FC1_S390C
ASTKGPSVFPLAPCSRSTSESTAALGCLVKDYFPEPVTVSWNSGALTSGVHTFPAVLQSSGLYSLSSVVTVPSSSLGTKTYTCNVDHKPSNTKVDKRVESKYGPPCPSCPAPEFLGGPSVFLFPPKPKDTLMISRTPEVTCVVVDVSQEDPEVQFNWYVDGVEVHNAKTKPREEQFNSTYRVVSVLTVLHQDWLNGKEYKCKVSNKGLPSSIEKTISKAKGQPREPQVYTLPPSQEEMTKNQVSLTCLVKGFYPSDIAVEWESNGQPENCYKTTPPVLDSDGSFFLYSRLTVDKSRWQEGNVFSCSVMHEALHNHYTQKSLSLSLGK

SEQ ID NO: 329 - protein, 327 aa, Artificial Sequence
  IgG4_FC2_S400'C
ASTKGPSVFPLAPCSRSTSESTAALGCLVKDYFPEPVTVSWNSGALTSGVHTFPAVLQSSGLYSLSSVVTVPSSSLGTKTYTCNVDHKPSNTKVDKRVESKYGPPCPSCPAPEFLGGPSVFLFPPKPKDTLMISRTPEVTCVVVDVSQEDPEVQFNWYVDGVEVHNAKTKPREEQFNSTYRVVSVLTVLHQDWLNGKEYKCKVSNKGLPSSIEKTISKAKGQPREPQVYTLPPSQEEMTKNQVSLTCLVKGFYPSDIAVEWESNGQPENNYKTTPPVLDCDGSFFLYSRLTVDKSRWQEGNVFSCSVMHEALHNHYTQKSLSLSLGK

SEQ ID NO: 330 - protein, 327 aa, Artificial Sequence; identical to SEQ ID NO: 329
  IgG4_FC1_

SEQ ID NO: 331 - protein, 327 aa, Artificial Sequence; identical to SEQ ID NO: 328
  IgG4_FC2_

SEQ ID NO: 332 - protein, 327 aa, Artificial Sequence
  IgG4_FC1_K392C
ASTKGPSVFPLAPCSRSTSESTAALGCLVKDYFPEPVTVSWNSGALTSGVHTFPAVLQSSGLYSLSSVVTVPSSSLGTKTYTCNVDHKPSNTKVDKRVESKYGPPCPSCPAPEFLGGPSVFLFPPKPKDTLMISRTPEVTCVVVDVSQEDPEVQFNWYVDGVEVHNAKTKPREEQFNSTYRVVSVLTVLHQDWLNGKEYKCKVSNKGLPSSIEKTISKAKGQPREPQVYTLPPSQEEMTKNQVSLTCLVKGFYPSDIAVEWESNGQPENNYCTTPPVLDSDGSFFLYSRLTVDKSRWQEGNVFSCSVMHEALHNHYTQKSLSLSLGK

SEQ ID NO: 333 - protein, 327 aa, Artificial Sequence
  IgG4_FC2_V397'C
ASTKGPSVFPLAPCSRSTSESTAALGCLVKDYFPEPVTVSWNSGALTSGVHTFPAVLQSSGLYSLSSVVTVPSSSLGTKTYTCNVDHKPSNTKVDKRVESKYGPPCPSCPAPEFLGGPSVFLFPPKPKDTLMISRTPEVTCVVVDVSQEDPEVQFNWYVDGVEVHNAKTKPREEQFNSTYRVVSVLTVLHQDWLNGKEYKCKVSNKGLPSSIEKTISKAKGQPREPQVYTLPPSQEEMTKNQVSLTCLVKGFYPSDIAVEWESNGQPENNYKTTPPCLDSDGSFFLYSRLTVDKSRWQEGNVFSCSVMHEALHNHYTQKSLSLSLGK

SEQ ID NO: 334 - protein, 327 aa, Artificial Sequence; identical to SEQ ID NO: 333
  IgG4_FC1_V397C

SEQ ID NO: 335 - protein, 327 aa, Artificial Sequence; identical to SEQ ID NO: 332
  IgG4_FC2_K392'C

SEQ ID NO: 336 - protein, 327 aa, Artificial Sequence; identical to SEQ ID NO: 332
  IgG4_FC1_K392C

SEQ ID NO: 337 - protein, 327 aa, Artificial Sequence; identical to SEQ ID NO: 329
  IgG4_FC2_S400'C

SEQ ID NO: 338 - protein, 327 aa, Artificial Sequence; identical to SEQ ID NO: 329
  IgG4_FC1_S400C

SEQ ID NO: 339 - protein, 327 aa, Artificial Sequence; identical to SEQ ID NO: 332
  IgG4_FC2_K392'C

SEQ ID NO: 340 - protein, 327 aa, Artificial Sequence
  IgG4_FC1_E357K:T411K
ASTKGPSVFPLAPCSRSTSESTAALGCLVKDYFPEPVTVSWNSGALTSGVHTFPAVLQSSGLYSLSSVVTVPSSSLGTKTYTCNVDHKPSNTKVDKRVESKYGPPCPSCPAPEFLGGPSVFLFPPKPKDTLMISRTPEVTCVVVDVSQEDPEVQFNWYVDGVEVHNAKTKPREEQFNSTYRVVSVLTVLHQDWLNGKEYKCKVSNKGLPSSIEKTISKAKGQPREPQVYTLPPSQEKMTKNQVSLTCLVKGFYPSDIAVEWESNGQPENNYKTTPPVLDSDGSFFLYSRLKVDKSRWQEGNVFSCSVMHEALHNHYTQKSLSLSLGK

SEQ ID NO: 341 - protein, 327 aa, Artificial Sequence
  IgG4_FC2_L351'D:K370'D
ASTKGPSVFPLAPCSRSTSESTAALGCLVKDYFPEPVTVSWNSGALTSGVHTFPAVLQSSGLYSLSSVVTVPSSSLGTKTYTCNVDHKPSNTKVDKRVESKYGPPCPSCPAPEFLGGPSVFLFPPKPKDTLMISRTPEVTCVVVDVSQEDPEVQFNWYVDGVEVHNAKTKPREEQFNSTYRVVSVLTVLHQDWLNGKEYKCKVSNKGLPSSIEKTISKAKGQPREPQVYTDPPSQEEMTKNQVSLTCLVDGFYPSDIAVEWESNGQPENNYKTTPPVLDSDGSFFLYSRLTVDKSRWQEGNVFSCSVMHEALHNHYTQKSLSLSLGK

SEQ ID NO: 342 - protein, 327 aa, Artificial Sequence
  IgG4_FC1_E357K:S364K
ASTKGPSVFPLAPCSRSTSESTAALGCLVKDYFPEPVTVSWNSGALTSGVHTFPAVLQSSGLYSLSSVVTVPSSSLGTKTYTCNVDHKPSNTKVDKRVESKYGPPCPSCPAPEFLGGPSVFLFPPKPKDTLMISRTPEVTCVVVDVSQEDPEVQFNWYVDGVEVHNAKTKPREEQFNSTYRVVSVLTVLHQDWLNGKEYKCKVSNKGLPSSIEKTISKAKGQPREPQVYTLPPSQEKMTKNQVKLTCLVKGFYPSDIAVEWESNGQPENNYKTTPPVLDSDGSFFLYSRLTVDKSRWQEGNVFSCSVMHEALHNHYTQKSLSLSLGK

SEQ ID NO: 343 - protein, 327 aa, Artificial Sequence; identical to SEQ ID NO: 341
  IgG4_FC2_L351'D:K370'D

SEQ ID NO: 344 - protein, 327 aa, Artificial Sequence
  IgG4_FC1_E356K:E357K:S364K
ASTKGPSVFPLAPCSRSTSESTAALGCLVKDYFPEPVTVSWNSGALTSGVHTFPAVLQSSGLYSLSSVVTVPSSSLGTKTYTCNVDHKPSNTKVDKRVESKYGPPCPSCPAPEFLGGPSVFLFPPKPKDTLMISRTPEVTCVVVDVSQEDPEVQFNWYVDGVEVHNAKTKPREEQFNSTYRVVSVLTVLHQDWLNGKEYKCKVSNKGLPSSIEKTISKAKGQPREPQVYTLPPSQKKMTKNQVKLTCLVKGFYPSDIAVEWESNGQPENNYKTTPPVLDSDGSFFLYSRLTVDKSRWQEGNVFSCSVMHEALHNHYTQKSLSLSLGK

SEQ ID NO: 345 - protein, 327 aa, Artificial Sequence
  IgG4_FC2_L351'D:K370'D:K439'D
ASTKGPSVFPLAPCSRSTSESTAALGCLVKDYFPEPVTVSWNSGALTSGVHTFPAVLQSSGLYSLSSVVTVPSSSLGTKTYTCNVDHKPSNTKVDKRVESKYGPPCPSCPAPEFLGGPSVFLFPPKPKDTLMISRTPEVTCVVVDVSQEDPEVQFNWYVDGVEVHNAKTKPREEQFNSTYRVVSVLTVLHQDWLNGKEYKCKVSNKGLPSSIEKTISKAKGQPREPQVYTDPPSQEEMTKNQVSLTCLVDGFYPSDIAVEWESNGQPENNYKTTPPVLDSDGSFFLYSRLTVDKSRWQEGNVFSCSVMHEALHNHYTQDSLSLSLGK

SEQ ID NO: 346 - protein, 327 aa, Artificial Sequence
  IgG4_FC1_E357K:S364K:N390C
ASTKGPSVFPLAPCSRSTSESTAALGCLVKDYFPEPVTVSWNSGALTSGVHTFPAVLQSSGLYSLSSVVTVPSSSLGTKTYTCNVDHKPSNTKVDKRVESKYGPPCPSCPAPEFLGGPSVFLFPPKPKDTLMISRTPEVTCVVVDVSQEDPEVQFNWYVDGVEVHNAKTKPREEQFNSTYRVVSVLTVLHQDWLNGKEYKCKVSNKGLPSSIEKTISKAKGQPREPQVYTLPPSQEKMTKNQVKLTCLVKGFYPSDIAVEWESNGQPENCYKTTPPVLDSDGSFFLYSRLTVDKSRWQEGNVFSCSVMHEALHNHYTQKSLSLSLGK

SEQ ID NO: 347 - protein, 327 aa, Artificial Sequence
  IgG4_FC2_L351'D:K370'D:S400'C
ASTKGPSVFPLAPCSRSTSESTAALGCLVKDYFPEPVTVSWNSGALTSGVHTFPAVLQSSGLYSLSSVVTVPSSSLGTKTYTCNVDHKPSNTKVDKRVESKYGPPCPSCPAPEFLGGPSVFLFPPKPKDTLMISRTPEVTCVVVDVSQEDPEVQFNWYVDGVEVHNAKTKPREEQFNSTYRVVSVLTVLHQDWLNGKEYKCKVSNKGLPSSIEKTISKAKGQPREPQVYTDPPSQEEMTKNQVSLTCLVDGFYPSDIAVEWESNGQPENNYKTTPPVLDCDGSFFLYSRLTVDKSRWQEGNVFSCSVMHEALHNHYTQKSLSLSLGK

SEQ ID NO: 348 - protein, 327 aa, Artificial Sequence
  IgG4_FC1_E357K:S364K:S400C
ASTKGPSVFPLAPCSRSTSESTAALGCLVKDYFPEPVTVSWNSGALTSGVHTFPAVLQSSGLYSLSSVVTVPSSSLGTKTYTCNVDHKPSNTKVDKRVESKYGPPCPSCPAPEFLGGPSVFLFPPKPKDTLMISRTPEVTCVVVDVSQEDPEVQFNWYVDGVEVHNAKTKPREEQFNSTYRVVSVLTVLHQDWLNGKEYKCKVSNKGLPSSIEKTISKAKGQPREPQVYTLPPSQEKMTKNQVKLTCLVKGFYPSDIAVEWESNGQPENNYKTTPPVLDCDGSFFLYSRLTVDKSRWQEGNVFSCSVMHEALHNHYTQKSLSLSLGK

SEQ ID NO: 349 - protein, 327 aa, Artificial Sequence
  IgG4_FC2_L351'D:K370'D:N390'C
ASTKGPSVFPLAPCSRSTSESTAALGCLVKDYFPEPVTVSWNSGALTSGVHTFPAVLQSSGLYSLSSVVTVPSSSLGTKTYTCNVDHKPSNTKVDKRVESKYGPPCPSCPAPEFLGGPSVFLFPPKPKDTLMISRTPEVTCVVVDVSQEDPEVQFNWYVDGVEVHNAKTKPREEQFNSTYRVVSVLTVLHQDWLNGKEYKCKVSNKGLPSSIEKTISKAKGQPREPQVYTDPPSQEEMTKNQVSLTCLVDGFYPSDIAVEWESNGQPENCYKTTPPVLDSDGSFFLYSRLTVDKSRWQEGNVFSCSVMHEALHNHYTQKSLSLSLGK

SEQ ID NO: 350 - protein, 327 aa, Artificial Sequence
  IgG4_FC1_E356K:E357K:S364K:N390C
ASTKGPSVFPLAPCSRSTSESTAALGCLVKDYFPEPVTVSWNSGALTSGVHTFPAVLQSSGLYSLSSVVTVPSSSLGTKTYTCNVDHKPSNTKVDKRVESKYGPPCPSCPAPEFLGGPSVFLFPPKPKDTLMISRTPEVTCVVVDVSQEDPEVQFNWYVDGVEVHNAKTKPREEQFNSTYRVVSVLTVLHQDWLNGKEYKCKVSNKGLPSSIEKTISKAKGQPREPQVYTLPPSQKKMTKNQVKLTCLVKGFYPSDIAVEWESNGQPENCYKTTPPVLDSDGSFFLYSRLTVDKSRWQEGNVFSCSVMHEALHNHYTQKSLSLSLGK

SEQ ID NO: 351 - protein, 327 aa, Artificial Sequence
  IgG4_FC2_L351'D:K370'D:S400'C:K439'D
ASTKGPSVFPLAPCSRSTSESTAALGCLVKDYFPEPVTVSWNSGALTSGVHTFPAVLQSSGLYSLSSVVTVPSSSLGTKTYTCNVDHKPSNTKVDKRVESKYGPPCPSCPAPEFLGGPSVFLFPPKPKDTLMISRTPEVTCVVVDVSQEDPEVQFNWYVDGVEVHNAKTKPREEQFNSTYRVVSVLTVLHQDWLNGKEYKCKVSNKGLPSSIEKTISKAKGQPREPQVYTDPPSQEEMTKNQVSLTCLVDGFYPSDIAVEWESNGQPENNYKTTPPVLDCDGSFFLYSRLTVDKSRWQEGNVFSCSVMHEALHNHYTQDSLSLSLGK

SEQ ID NO: 352 - protein, 327 aa, Artificial Sequence
  IgG4_FC1_E356K:E357K:S364K:S400C
ASTKGPSVFPLAPCSRSTSESTAALGCLVKDYFPEPVTVSWNSGALTSGVHTFPAVLQSSGLYSLSSVVTVPSSSLGTKTYTCNVDHKPSNTKVDKRVESKYGPPCPSCPAPEFLGGPSVFLFPPKPKDTLMISRTPEVTCVVVDVSQEDPEVQFNWYVDGVEVHNAKTKPREEQFNSTYRVVSVLTVLHQDWLNGKEYKCKVSNKGLPSSIEKTISKAKGQPREPQVYTLPPSQKKMTKNQVKLTCLVKGFYPSDIAVEWESNGQPENNYKTTPPVLDCDGSFFLYSRLTVDKSRWQEGNVFSCSVMHEALHNHYTQKSLSLSLGK

SEQ ID NO: 353 - protein, 327 aa, Artificial Sequence
  IgG4_FC2_L351'D:K370'D:N390'C:K439'D
ASTKGPSVFPLAPCSRSTSESTAALGCLVKDYFPEPVTVSWNSGALTSGVHTFPAVLQSSGLYSLSSVVTVPSSSLGTKTYTCNVDHKPSNTKVDKRVESKYGPPCPSCPAPEFLGGPSVFLFPPKPKDTLMISRTPEVTCVVVDVSQEDPEVQFNWYVDGVEVHNAKTKPREEQFNSTYRVVSVLTVLHQDWLNGKEYKCKVSNKGLPSSIEKTISKAKGQPREPQVYTDPPSQEEMTKNQVSLTCLVDGFYPSDIAVEWESNGQPENCYKTTPPVLDSDGSFFLYSRLTVDKSRWQEGNVFSCSVMHEALHNHYTQDSLSLSLGK

SEQ ID NO: 354 - protein, 327 aa, Artificial Sequence
  IgG4_FC1_T366S,L368A,Y407V,N390C
ASTKGPSVFPLAPCSRSTSESTAALGCLVKDYFPEPVTVSWNSGALTSGVHTFPAVLQSSGLYSLSSVVTVPSSSLGTKTYTCNVDHKPSNTKVDKRVESKYGPPCPSCPAPEFLGGPSVFLFPPKPKDTLMISRTPEVTCVVVDVSQEDPEVQFNWYVDGVEVHNAKTKPREEQFNSTYRVVSVLTVLHQDWLNGKEYKCKVSNKGLPSSIEKTISKAKGQPREPQVYTLPPSQEEMTKNQVSLSCAVKGFYPSDIAVEWESNGQPENCYKTTPPVLDSDGSFFLVSRLTVDKSRWQEGNVFSCSVMHEALHNHYTQKSLSLSLGK

SEQ ID NO: 355 - protein, 327 aa, Artificial Sequence
  IgG4_FC2_T366'W,S400'C
ASTKGPSVFPLAPCSRSTSESTAALGCLVKDYFPEPVTVSWNSGALTSGVHTFPAVLQSSGLYSLSSVVTVPSSSLGTKTYTCNVDHKPSNTKVDKRVESKYGPPCPSCPAPEFLGGPSVFLFPPKPKDTLMISRTPEVTCVVVDVSQEDPEVQFNWYVDGVEVHNAKTKPREEQFNSTYRVVSVLTVLHQDWLNGKEYKCKVSNKGLPSSIEKTISKAKGQPREPQVYTLPPSQEEMTKNQVSLWCLVKGFYPSDIAVEWESNGQPENNYKTTPPVLDCDGSFFLYSRLTVDKSRWQEGNVFSCSVMHEALHNHYTQKSLSLSLGK

SEQ ID NO: 356 - protein, 327 aa, Artificial Sequence
  IgG4_FC1_T366S,L368A,Y407V,S400C
ASTKGPSVFPLAPCSRSTSESTAALGCLVKDYFPEPVTVSWNSGALTSGVHTFPAVLQSSGLYSLSSVVTVPSSSLGTKTYTCNVDHKPSNTKVDKRVESKYGPPCPSCPAPEFLGGPSVFLFPPKPKDTLMISRTPEVTCVVVDVSQEDPEVQFNWYVDGVEVHNAKTKPREEQFNSTYRVVSVLTVLHQDWLNGKEYKCKVSNKGLPSSIEKTISKAKGQPREPQVYTLPPSQEEMTKNQVSLSCAVKGFYPSDIAVEWESNGQPENNYKTTPPVLDCDGSFFLVSRLTVDKSRWQEGNVFSCSVMHEALHNHYTQKSLSLSLGK

SEQ ID NO: 357 - protein, 327 aa, Artificial Sequence
  IgG4_FC2_T366'W,N390'C
ASTKGPSVFPLAPCSRSTSESTAALGCLVKDYFPEPVTVSWNSGALTSGVHTFPAVLQSSGLYSLSSVVTVPSSSLGTKTYTCNVDHKPSNTKVDKRVESKYGPPCPSCPAPEFLGGPSVFLFPPKPKDTLMISRTPEVTCVVVDVSQEDPEVQFNWYVDGVEVHNAKTKPREEQFNSTYRVVSVLTVLHQDWLNGKEYKCKVSNKGLPSSIEKTISKAKGQPREPQVYTLPPSQEEMTKNQVSLWCLVKGFYPSDIAVEWESNGQPENCYKTTPPVLDSDGSFFLYSRLTVDKSRWQEGNVFSCSVMHEALHNHYTQKSLSLSLGK

SEQ ID NO: 358 - protein, 327 aa, Artificial Sequence
  IgG4_FC1_Y349C,L368V,Y407V
ASTKGPSVFPLAPCSRSTSESTAALGCLVKDYFPEPVTVSWNSGALTSGVHTFPAVLQSSGLYSLSSVVTVPSSSLGTKTYTCNVDHKPSNTKVDKRVESKYGPPCPSCPAPEFLGGPSVFLFPPKPKDTLMISRTPEVTCVVVDVSQEDPEVQFNWYVDGVEVHNAKTKPREEQFNSTYRVVSVLTVLHQDWLNGKEYKCKVSNKGLPSSIEKTISKAKGQPREPQVCTLPPSQEEMTKNQVSLTCVVKGFYPSDIAVEWESNGQPENNYKTTPPVLDSDGSFFLVSRLTVDKSRWQEGNVFSCSVMHEALHNHYTQKSLSLSLGK

SEQ ID NO: 359 - protein, 327 aa, Artificial Sequence
  IgG4_FC2_S354'C,T366'W
ASTKGPSVFPLAPCSRSTSESTAALGCLVKDYFPEPVTVSWNSGALTSGVHTFPAVLQSSGLYSLSSVVTVPSSSLGTKTYTCNVDHKPSNTKVDKRVESKYGPPCPSCPAPEFLGGPSVFLFPPKPKDTLMISRTPEVTCVVVDVSQEDPEVQFNWYVDGVEVHNAKTKPREEQFNSTYRVVSVLTVLHQDWLNGKEYKCKVSNKGLPSSIEKTISKAKGQPREPQVYTLPPCQEEMTKNQVSLWCLVKGFYPSDIAVEWESNGQPENNYKTTPPVLDSDGSFFLYSRLTVDKSRWQEGNVFSCSVMHEALHNHYTQKSLSLSLGK

SEQ ID NO: 360 - protein, 327 aa, Artificial Sequence
  IgG4_FC1_L368V,Y407V
ASTKGPSVFPLAPCSRSTSESTAALGCLVKDYFPEPVTVSWNSGALTSGVHTFPAVLQSSGLYSLSSVVTVPSSSLGTKTYTCNVDHKPSNTKVDKRVESKYGPPCPSCPAPEFLGGPSVFLFPPKPKDTLMISRTPEVTCVVVDVSQEDPEVQFNWYVDGVEVHNAKTKPREEQFNSTYRVVSVLTVLHQDWLNGKEYKCKVSNKGLPSSIEKTISKAKGQPREPQVYTLPPSQEEMTKNQVSLTCVVKGFYPSDIAVEWESNGQPENNYKTTPPVLDSDGSFFLVSRLTVDKSRWQEGNVFSCSVMHEALHNHYTQKSLSLSLGK

SEQ ID NO: 361 - protein, 327 aa, Artificial Sequence
  IgG4_FC2_T366'W
ASTKGPSVFPLAPCSRSTSESTAALGCLVKDYFPEPVTVSWNSGALTSGVHTFPAVLQSSGLYSLSSVVTVPSSSLGTKTYTCNVDHKPSNTKVDKRVESKYGPPCPSCPAPEFLGGPSVFLFPPKPKDTLMISRTPEVTCVVVDVSQEDPEVQFNWYVDGVEVHNAKTKPREEQFNSTYRVVSVLTVLHQDWLNGKEYKCKVSNKGLPSSIEKTISKAKGQPREPQVYTLPPSQEEMTKNQVSLWCLVKGFYPSDIAVEWESNGQPENNYKTTPPVLDSDGSFFLYSRLTVDKSRWQEGNVFSCSVMHEALHNHYTQKSLSLSLGK

SEQ ID NO: 362 - protein, 327 aa, Artificial Sequence
  IgG4_FC1_L368V,Y407V,N390C
ASTKGPSVFPLAPCSRSTSESTAALGCLVKDYFPEPVTVSWNSGALTSGVHTFPAVLQSSGLYSLSSVVTVPSSSLGTKTYTCNVDHKPSNTKVDKRVESKYGPPCPSCPAPEFLGGPSVFLFPPKPKDTLMISRTPEVTCVVVDVSQEDPEVQFNWYVDGVEVHNAKTKPREEQFNSTYRVVSVLTVLHQDWLNGKEYKCKVSNKGLPSSIEKTISKAKGQPREPQVYTLPPSQEEMTKNQVSLTCVVKGFYPSDIAVEWESNGQPENCYKTTPPVLDSDGSFFLVSRLTVDKSRWQEGNVFSCSVMHEALHNHYTQKSLSLSLGK

SEQ ID NO: 363 - protein, 327 aa, Artificial Sequence; identical to SEQ ID NO: 355
  IgG4_FC2_T366'W,S400'C

SEQ ID NO: 364 - protein, 327 aa, Artificial Sequence
  IgG4_FC1_L368V,Y407V,S400C
ASTKGPSVFPLAPCSRSTSESTAALGCLVKDYFPEPVTVSWNSGALTSGVHTFPAVLQSSGLYSLSSVVTVPSSSLGTKTYTCNVDHKPSNTKVDKRVESKYGPPCPSCPAPEFLGGPSVFLFPPKPKDTLMISRTPEVTCVVVDVSQEDPEVQFNWYVDGVEVHNAKTKPREEQFNSTYRVVSVLTVLHQDWLNGKEYKCKVSNKGLPSSIEKTISKAKGQPREPQVYTLPPSQEEMTKNQVSLTCVVKGFYPSDIAVEWESNGQPENNYKTTPPVLDCDGSFFLVSRLTVDKSRWQEGNVFSCSVMHEALHNHYTQKSLSLSLGK

SEQ ID NO: 365 - protein, 327 aa, Artificial Sequence; identical to SEQ ID NO: 357
  IgG4_FC2_T366'W,N390'C

What is claimed is:

1. A heterodimeric protein comprising a first polypeptide comprising a first immunoglobulin heavy chain constant domain 3 (CH3 domain) and a second polypeptide comprising a second CH3 domain, wherein:
i) the first CH3 domain comprises a cysteine (C) residue at position 390 and the second CH3 domain comprises a cysteine residue at position 400, or the first CH3 domain comprises a cysteine residue at position 400 and the second CH3 domain comprises a cysteine residue at position 390; or
ii) the first CH3 domain comprises a cysteine residue at position 392 and the second CH3 domain comprises a cysteine residue at position 397, or the first CH3 domain comprises a cysteine residue at position 397 and the second CH3 domain comprises a cysteine residue at position 392; or
iii) the first CH3 domain comprises a cysteine residue at position 392 and the second CH3 domain comprises a cysteine residue at position 400, or the first CH3 domain comprises a cysteine residue at position 400 and the second CH3 domain comprises a cysteine residue at position 392; and
wherein the amino acid residue numbering is based on EU numbering.

2. The heterodimeric protein of claim 1, wherein:
i) the first CH3 domain comprises N390C substitution and the second CH3 domain comprises S400C substitution, or the first CH3 domain comprises S400C substitution and the second CH3 domain comprises N390C substitution; or
ii) the first CH3 domain comprises K392C substitution and the second CH3 domain comprises V397C substitution, or the first CH3 domain comprises V397C substitution and the second CH3 domain comprises K392C substitution; or
iii) the first CH3 domain comprises K392C substitution and the second CH3 domain comprises S400C substitution, or the first CH3 domain comprises S400C substitution and the second CH3 domain comprises K392C substitution.

3. The heterodimeric protein of claim 1 or claim 2, wherein:
i) the first CH3 domain further comprises a positively charged residue at position 357 and the second CH3 domain further comprises a negatively charged residue at position 351, or the first CH3 domain further comprises a negatively charged residue at position 351 and the second CH3 domain further comprises a positively charged residue at position 357; or
ii) the first CH3 domain further comprises a positively charged residue at position 411 and the second CH3 domain further comprises a negatively charged residue at position 370, or the first CH3 domain further comprises a negatively charged residue at position 370 and the second CH3 domain further comprises a positively charged residue at position 411; or
iii) the first CH3 domain further comprises a positively charged residue at position 364 and the second CH3 domain further comprises a negatively charged residue at position 370, or the first CH3 domain further comprises a negatively charged residue at position 370 and the second CH3 domain further comprises a positively charged residue at position 364; or
a combination of i) and ii), or a combination of i) and iii); and
wherein the amino acid residue numbering is based on EU numbering.

4. The heterodimeric protein of any one of claims 1-3, wherein the first CH3 domain further comprises a positively charged residue at position 356 and the second CH3 domain further comprises a negatively charged residue at position 439, or first CH3 domain further comprises a negatively charged residue at position 439 and the second CH3 domain further comprises a positively charged residue at position 356; and wherein the amino acid residue numbering is based on EU numbering.

5. The heterodimeric protein of claim 3 or claim 4, wherein:
i) the positively charged residue is a lysine (K) residue, and the negatively charged residue is an aspartic acid (D) residue; or
ii) the positively charged residue is a lysine (K) residue, and the negatively charged residue is a glutamic acid (E) residue; or
iii) the positively charged residue is an arginine (R) residue, and the negatively charged residue is an aspartic acid (D) residue; or
iv) the positively charged residue is an arginine (R) residue, and the negatively charged residue is a glutamic acid (E) residue.

6. The heterodimeric protein of claim 5, wherein:
i) the first CH3 domain comprises E357K and T411K substitutions and the second CH3 domain comprises L351D and K370D substitutions, or the first CH3 domain comprises L351D and K370D substitutions and the second CH3 domain comprises E357K and T411K substitutions; or
ii) the first CH3 domain comprises E357K and S364K substitutions and the second CH3 domain comprises L351D and K370D substitutions, or the first CH3 domain comprises L351D and K370D substitutions and the second CH3 domain comprises E357K and S364K substitutions; or
iii) the first CH3 domain comprises D356K, E357K and S364K substitutions and the second CH3 domain comprises L351D, K370D and K439D substitutions, or the first CH3 domain comprises L351 D, K370D and K439D substitutions and the second CH3 domain comprises D356K, E357K and S364K substitutions.

7. The heterodimeric protein of any one of claims 1-5, wherein:
i) the first CH3 domain further comprises K392D and K409D substitutions and the second CH3 domain further comprises D356K and D399K substitutions, or the first CH3 domain further comprises D356K and D399K substitutions and the second CH3 domain further comprises K392D and K409D substitutions; or
ii) the first CH3 domain further comprises L368D and K370S substitutions and the second CH3 domain further comprises E357Q and S364K substitutions, or the first CH3 domain further comprises E357Q and S364K substitutions and the second CH3 domain further comprises L368D and K370S substitutions; or
iii) the first CH3 domain further comprises L351K and T366K substitutions and the second CH3 domain further comprises L351D and L368E substitutions, or the first CH3 domain further comprises L351D and L368E substitutions and the second CH3 domain further comprises L351K and T366K substitutions; or
(iv) the first CH3 domain further comprises P395K, P396K and V397K substitutions and the second CH3 domain comprises T394D, P395D and P396D substitutions, or the first CH3 domain further comprises T394D, P395D and P3% D substitutions and the second CH3 domain further comprises P395K, P396K and V397K substitutions; or
(v) the first CH3 domain further comprises F405E, Y407E and K409E substitutions and the second CH3 domain comprises F405K and Y407K substitutions, or the first CH3 domain further comprises F405K and Y407K substitutions and the second CH3 domain further comprises F405E, Y407E and K409E substitutions.

8. The heterodimeric protein of claim 6, wherein
i) the first CH3 domain comprises E357K, S364K and N390C substitutions and the second CH3 domain comprises L351D, K370D, and S400C substitutions, or the first CH3 domain comprises L351D, K370D, and S400C substitutions and the second CH3 domain comprises E357K, S364K and N390C substitutions; or
ii) the first CH3 domain comprises E357K, S364K and S400C substitutions and the second CH3 domain comprises L351D, K370D, and N390C substitutions, or the first CH3 domain comprises L351D, K370D, and N390C substitutions and the second CH3 domain comprises E357K, S364K and S400C substitutions; or
iii) the first CH3 domain comprises D356K, E357K, S364K and S400C substitutions and the second CH3 domain comprises L351D, K370D, N390C and K439D substitutions, or the first CH3 domain comprises L351D, K370D, N390C and K439D substitutions and the second CH3 domain comprises D356K, E357K, S364K and S400C substitutions; or
iv) the first CH3 domain comprises D356K, E357K, S364K and N390C substitutions and the second CH3 domain comprises L351D, K370D, K439D and S400C substitutions, or the first CH3 domain comprises L351D, K370D, K439D and S400C substitutions and the second CH3 domain comprises D356K, E357K, S364K and N390C substitutions.

9. The heterodimeric protein of any one of claims 1-8, wherein the first CH3 domain and the second CH3 domain further comprise knob-into-hole residues.

10. The heterodimeric protein of claim 9, wherein:
i) the first CH3 domain comprises T336S, L368A and Y407V substitutions and the second CH3 domain comprises T366W substitution, or the first CH3 domain comprises T366W substitution and the second CH3 domain comprises T336S, L368A and Y407V substitutions; or
ii) the first CH3 domain comprises L368V and Y407V substitutions and the second CH3 domain comprises T366W substitution, or the first CH3 domain comprises T366W substitution and the second CH3 domain comprises L368V and Y407V substitutions.

11. A heterodimeric protein comprising a first polypeptide comprising a first CH3 domain and a second polypeptide comprising a second CH3 domain, wherein:
i) the first CH3 domain comprises a positively charged residue at position 357 and the second CH3 domain comprises a negatively charged residue at position 351, or the first CH3 domain comprises a negatively charged residue at position 351 and the second CH3 domain comprises a positively charged residue at position 357; or
ii) the first CH3 domain comprises a positively charged residue at position 411 and the second CH3 domain comprises a negatively charged residue at position 370, or the first CH3 domain comprises a negatively charged residue at position 370 and the second CH3 domain comprises a positively charged residue at position 411; or
iii) the first CH3 domain comprises a positively charged residue at position 364 and the second CH3 domain comprises a negatively charged residue at position 370, or the first CH3 domain comprises a negatively charged residue at position 370 and the second CH3 domain comprises a positively charged residue at position 364; and wherein the amino acid residue numbering is based on EU numbering.

12. The heterodimeric protein of claim 11, wherein the first CH3 domain comprises a charged residue at position 356 and the second CH3 domain comprises a negatively charged residue at position 439, or first CH3 domain comprises a negatively charged residue at position 439 and the second CH3 domain comprises a positively charged residue at position 356; and wherein the amino acid residue numbering is based on EU numbering.

13. The heterodimeric protein of claim 11 or claim 12, wherein:
i) the positively charged residue is a lysine (K) residue, and the negatively charged residue is an aspartic acid (D) residue; or
ii) the positively charged residue is a lysine (K) residue, and the negatively charged residue is a glutamic acid (E) residue; or
iii) the positively charged residue is an arginine (R) residue, and the negatively charged residue is an aspartic acid (D) residue; or
iv) the positively charged residue is an arginine (R) residue, and the negatively charged residue is a glutamic acid (E) residue.

14. The heterodimeric protein of claim 13, wherein:
i) the first CH3 domain comprises E357K and T411K substitutions and the second CH3 domain comprises L351D and K370D substitutions, or the first CH3 domain comprises L351D and K370D substitutions and the second CH3 domain comprises E357K and T411K substitutions; or
ii) the first CH3 domain comprises E357K and S364K substitutions and the second CH3 domain comprises L351D and K370D substitutions, or the first CH3 domain comprises L351D and K370D substitutions and the second CH3 domain comprises E357K and S364K substitutions; or
iii) the first CH3 domain comprises D356K, E357K and S364K substitutions and the second CH3 domain comprises L351D, K370D and K439D substitutions, or the first CH3 domain comprises L351 D, K370D and K439D substitutions and the second CH3 domain comprises D356K, E357K and S364K substitutions.

15. The heterodimeric protein of any one of claims 11-14, wherein:
i) the first CH3 domain further comprises K392C substitution and the second CH3 domain further comprises D399C substitution, or the first CH3 domain further comprises D399C substitution and the second CH3 domain further comprises K392C substitution; or
ii) the first CH3 domain further comprises Y394C substitution and the second CH3 domain further comprises S354C substitution, or the first CH3 domain further comprises S354C substitution and the second CH3 domain further comprises Y394C substitution; or
iii) the first CH3 domain further comprises D356C substitution and the second CH3 domain further comprises Y349C substitution, or the first CH3 domain further comprises Y349C substitution and the second CH3 domain further comprises D356C substitution.

16. The heterodimeric protein of any one of claims 1-15, wherein the first CH3 domain and the second CH3 domain are human CH3 domains.

17. The heterodimeric protein of any one of claims 1-16, wherein the first polypeptide and the second polypeptide each comprises from the N-terminus to the C-terminus at least a portion of an immunoglobulin hinge region, an immunoglobulin heavy chain constant domain 2 (CH2 domain), and the CH3 domain.

18. The heterodimeric protein of claim 17, wherein the CH2 domains and the CH3 domains form an IgG Fc region.

19. The heterodimeric protein of claim 18, wherein the Fc region is of the human IgG1 subclass.

20. The heterodimeric protein of claim 18, wherein the Fc region is of the human IgG4 subclass.

21. The heterodimeric protein of claim 20, wherein the Fc region further comprises S228P substitution.

22. The heterodimeric protein of any one of claims 18-20, wherein the Fc region further comprises N297A substitution.

23. The heterodimeric protein of any one of claims 1-22, the first polypeptide and the second polypeptide are antibody heavy chains, and wherein the heterodimeric protein further comprises one or more antibody light chains.

24. The heterodimeric protein of claim 23, wherein the heterodimeric protein is a multispecific antibody.

25. The heterodimeric protein of claim 24, further comprising a third polypeptide and a fourth polypeptide, wherein:
(i) the first polypeptide comprises a structure represented by the formula:
VH1-CH1-hinge-CH2-first CH3-L1-scFv1 (Ia);
(ii) the second polypeptide comprises a structure represented by the formula:
VH2-CH1-hinge-CH2-second CH3-L2-scFv2 (IIa);
(iii) the third polypeptide comprises a structure represented by the formula:
VL1-CL (Ib); and
(iv) the fourth polypeptide comprises a structure represented by the formula:
VL2-CL (IIb);
wherein:
VL1 is a first immunoglobulin light chain variable domain;
VH1 is a first immunoglobulin heavy chain variable domain;
VL2 is a second immunoglobulin light chain variable domain;
VH2 is a second immunoglobulin heavy chain variable domain;
scFv1 is a first single-chain variable fragment;
scFv2 is a second single-chain variable fragment;
CL is an immunoglobulin light chain constant domain;
CH1 is an immunoglobulin heavy chain constant domain 1:
CH2 is an immunoglobulin heavy chain constant domain 2;
hinge is an immunoglobulin hinge region connecting the CH1 and CH2 domains; and
L1 and L2 is each independently a bond or a peptide linker;
wherein VL1 and VH1 associate to form a first Fv that specifically binds to a first target;
wherein VL2 and VH2 associate to form a second Fv that specifically binds to a second target;
wherein scFv1 specifically binds to a third target; and
wherein scFv2 specifically binds to a fourth target.

26. The heterodimeric protein of claim 25, wherein scFv1 and scFv2 are identical.

27. The heterodimeric protein of claim 25 or 26, wherein VL1 and VL2 are identical.

28. The heterodimeric protein of claim 26 or 27, wherein the first Fv specifically binds PDL1, the second Fv specifically binds CD137, and scFv1 and scFv2 specifically bind CTLA-4.

29. The heterodimeric protein of claim 24, further comprising a third polypeptide, wherein:
(i) the first polypeptide comprises a structure represented by the formula:
VH-CH1-hinge-CH2-first CH3 (IIIa);
(ii) the second polypeptide comprises a structure represented by the formula:
scFv-hinge-CH2-second CH3 (IVa); and
(iii) the third polypeptide comprises a structure represented by the formula:
VL-CL (IIIb);
wherein:
VL is an immunoglobulin light chain variable domain;
VH is an immunoglobulin heavy chain variable domain;
scFv is a single-chain variable fragment;
CL is an immunoglobulin light chain constant domain;
CH1 is an immunoglobulin heavy chain constant domain 1;
CH2 is an immunoglobulin heavy chain constant domain 2;
and hinge is an immunoglobulin hinge region connecting the CH1 and CH2 domains;
wherein VL and VH associate to form an Fv that specifically binds to a first target; and
wherein the scFv specifically binds to a second target.

30. The heterodimeric protein of claim 29, wherein the Fv specifically binds CD137 and the scFv specifically binds PDL1.

31. The heterodimeric protein of claim 24, wherein the heterodimeric protein is an activatable antibody, wherein the heterodimeric protein comprises a third polypeptide, and wherein:
(i) the first polypeptide comprises a structure represented by the formula:
VH-CH1-hinge-CH2-first CH3 (Va);
(ii) the second polypeptide comprises a structure represented by the formula:
MM1-CM1-scFv-hinge-CH2-second CH3 (VIa); and
(iii) the third polypeptide comprises a structure represented by the formula:
MM2-CM2-VL-CL (IVb);
wherein:
VL is an immunoglobulin light chain variable domain;
VH is an immunoglobulin heavy chain variable domain;
scFv is a single-chain variable fragment;
CL is an immunoglobulin light chain constant domain;
CH1 is an immunoglobulin heavy chain constant domain 1;
CH2 is an immunoglobulin heavy chain constant domain 2;
hinge is an immunoglobulin hinge region connecting the CH1 and CH2 domains;
MM1 is a first masking peptide;
MM2 is a second masking peptide;
CM1 is a first cleavable peptide; and
CM2 is a second cleavable peptide;
wherein VL and VH associate to form a first Fv that specifically binds to a first target;
wherein the scFv specifically binds to a second target;
wherein MM1 inhibits the binding of the scFv to the first target when CM1 is not cleaved; and
wherein MM2 inhibits the binding of the first Fv to the second target when CM2 is not cleaved.

32. The heterodimeric protein of claim 29 or 31, wherein the first target is a tumor antigen, and the second target is CD3.

33. The heterodimeric protein of claim 31 or 32, wherein MM1 comprises the amino acid sequence of SEQ ID NO: 35.

34. The heterodimeric protein of claim 32 or 33, wherein the first target is HER2.

35. The heterodimeric protein of claim 34, wherein MM2 comprises the amino acid sequence of SEQ ID NO: 36.

36. An activatable antibody comprising: a first polypeptide comprising, from N-terminus to C-terminus, a masking moiety (MM), a cleavable moiety (CM), and a target binding moiety (TBM), wherein the MM comprises the amino acid sequence of SEQ ID NO: 35; wherein the MM inhibits binding of the activatable antibody to human CD3 when the CM is not cleaved; wherein the CM comprises at least a first cleavage site; and wherein:
a) the TBM comprises a VL and the activatable antibody further comprises a second polypeptide comprising a VH;
b) the TBM comprises a VH and the activatable antibody further comprises a second polypeptide comprising a VL:
c) the TBM comprises from the N-terminus to the C-terminus, a VL and a VH; or
d) the TBM comprise from the N-terminus to the C-terminus, a VH and a VL; and
wherein the activatable antibody binds to human CD3 via the VH and VL when the CM is cleaved.

37. An activatable antibody comprising: a first polypeptide comprising, from N-terminus to C-terminus, a masking moiety (MM), a cleavable moiety (CM), and a target binding moiety (TBM), wherein the MM comprises the amino acid sequence of SEQ ID NO: 36; wherein the MM inhibits binding of the activatable antibody to human HER2 when the CM is not cleaved;
wherein the CM comprises at least a first cleavage site; and wherein:
a) the TBM comprises a VL and the activatable antibody further comprises a second polypeptide comprising a VH;
b) the TBM comprises a VH and the activatable antibody further comprises a second polypeptide comprising a VL;
c) the TBM comprises from the N-terminus to the C-terminus, a VL and a VH; or
d) the TBM comprise from the N-terminus to the C-terminus, a VH and a VL; and
wherein the activatable antibody binds to human HER2 via the VH and VL when the CM is cleaved.

38. The activatable antibody of claim 36 or 37, comprising a first polypeptide, a second polypeptide and a third polypeptide, wherein:
(i) the first polypeptide comprises a structure represented by the formula:
VH-CH1-hinge-CH2-first CH3 (Va);
(ii) the second polypeptide comprises a structure represented by the formula:
MM1-CM1-scFv-hinge-CH2-second CH3 (VIa); and
(iii) the third polypeptide comprises a structure represented by the formula:
MM2-CM2-VL-CL (IVb);
wherein:
VL is an immunoglobulin light chain variable domain;
VH is an immunoglobulin heavy chain variable domain;
scFv is a single-chain variable fragment;
CL is an immunoglobulin light chain constant domain;
CH1 is an immunoglobulin heavy chain constant domain 1;
CH2 is an immunoglobulin heavy chain constant domain 2;
hinge is an immunoglobulin hinge region connecting the CH1 and CH2 domains;
MM1 is a first masking peptide;
MM2 is a second masking peptide;
CM1 is a first cleavable peptide; and
CM2 is a second cleavable peptide;
wherein VL and VH associate to form a first Fv that specifically binds to a first target;
wherein the scFv specifically binds to a second target; and wherein MM is MM1 or MM2.

39. The heterodimeric protein of any one of claims 32-35 or the activatable antibody of claim 36 or 38, wherein the first Fv or the TBM comprises a VH comprising an CDR-H1 comprising the amino acid sequence of SEQ ID NO: 61, a CDR-H2 comprising the amino acid sequence of SEQ ID NO: 62, and/or a CDR-H3 comprising the amino acid sequence of SEQ ID NO: 63. In some embodiments, the TBM comprises a VL comprising a CDR-L1 comprising the amino acid sequence of SEQ ID NO: 64, a CDR-L2 comprising the amino acid sequence of SEQ ID NO: 65, and/or a CDR-L3 comprising the amino acid sequence of SEQ ID NO: 66.

40. The heterodimeric protein of claim 34 or 35, or the activatable antibody of any one of claims 37-39, wherein the scFv or the TBM comprises a VH comprising an CDR-H1 comprising the amino acid sequence of SEQ ID NO: 69, a CDR-H2 comprising the amino acid sequence of SEQ ID NO: 70, and/or a CDR-H3 comprising the amino acid sequence of SEQ ID NO: 71. In some embodiments, the TBM comprises a VL comprising a CDR-L1 comprising the amino acid sequence of SEQ ID NO: 72, a CDR-L2 comprising the amino acid sequence of SEQ ID NO: 73, and/or a CDR-L3 comprising the amino acid sequence of SEQ ID NO: 74

41. The heterodimeric protein of any one of claims 31-35 or the activatable antibody of any one of claims 36-40, wherein the activatable antibody comprises an Fc region comprising a first CH3 domain and a second CH3 domain, wherein the first CH3 domain comprises D356K, E357K, S364K and S400C substitutions and the second CH3 domain comprises L351D, K370D, N390C and K439D substitutions, or the first CH3 domain comprises L351D, K370D, N390C and K439D substitutions and the second CH3 domain comprises D356K, E357K, S364K and S400C substitutions.

42. One or more nucleic acid(s) encoding the heterodimeric protein of any one of claims 1-35 and 39-41 or the activatable antibody of any one of claims 36-41.

43. A vector comprising the one or more nucleic acid(s) of claim 42.

44. A host cell comprising the one or more nucleic acid(s) of claim 42 or the vector of claim 43.

45. A method for preparing a heterodimeric protein or an activatable antibody, comprising:
(a) culturing the host cell of claim 44 under conditions that allow expression of the one or more nucleic acid(s) or vector; and
(b) recovering the heterodimeric protein or the activatable antibody from the host cell culture.

46. A pharmaceutical composition comprising the heterodimeric protein of 1-35 and 39-41 or the activatable antibody of any one of claims 36-41, and a pharmaceutically acceptable carrier.

47. A method for treating a disease or condition in a subject in need thereof, comprising administering to the subject an effective amount of the pharmaceutical composition of claim 46.

48. The method of claim 47, wherein the disease or condition is cancer.

49. The method of claim 48, wherein the cancer is lung cancer.

50. The method of claim 48, wherein the cancer is ovarian cancer.
